(19) United States
(12) Patent Application Publication
(10) Pub. No.: US 2011/0053792 A1
(43) Pub. Date: Mar. 3, 2011

(54) MICROARRAY FOR EXPRESSION ANALYSIS OF CELLULAR GLYCOSYLATION MECHANISM

(76) Inventor: Wolfgang Kemmner, Berlin (DE)

(21) Appl. No.: 12/682,172

(22) PCT Filed: Oct. 8, 2008
(86) PCT No.: PCT/EP08/08498

§ 371 Date: Sep. 28, 2010

(30) Foreign Application Priority Data
Oct. 8, 2007 (EP) 07019664.7

(51) Int. Cl. C40B 30/04; C40B 40/06

(52) U.S. Cl. 506/9; 506/16

(57) ABSTRACT

The present invention relates to a support onto which a set of probes is applied wherein the set comprises: (a) probes capable of specifically hybridising with nucleic acids encoding fucosyltransferases; (b) probes capable of specifically hybridising with nucleic acids encoding galactosyltransferases; (c) probes capable of specifically hybridising with nucleic acids encoding N-acetylglucosaminyltransferases; (d) probes capable of specifically hybridising with nucleic acids encoding N-acetylgalactosaminyltransferases; (e) probes capable of specifically hybridising with nucleic acids encoding sialyltransferases; (f) probes capable of specifically hybridising with nucleic acids encoding sugar sulfotransferases; (g) probes capable of specifically hybridising with nucleic acids encoding lectins; (h) probes capable of specifically hybridising with nucleic acids encoding selectins; (i) probes capable of specifically hybridising with nucleic acids encoding fucosidases; (j) probes capable of specifically hybridising with nucleic acids encoding neuraminidases (sialidases); (k) probes capable of specifically hybridising with nucleic acids encoding nucleotide sugar epimerases; (l) probes capable of specifically hybridising with nucleic acids encoding sugar kinases; (m) probes capable of specifically hybridising with nucleic acids encoding sugar epimerases; (n) probes capable of specifically hybridising with nucleic acids encoding sugar transporters; and (o) probes capable of specifically hybridising with nucleic acids encoding enzymes of the fucose or sialic acid metabolism. The invention further relates to a kit which comprises the probes of the invention and the use of the support or the kit of the invention for the quantitative determination of expression profiles in a sample obtained from a cell, a tissue or an organism. The present invention further relates to a diagnostic composition and the use of the set of probes of the invention for the preparation of diagnostic compositions or of a diagnostic apparatus for the diagnosis of tumours, inflammatory and/or neurological diseases.

[0001] The present invention relates to a support onto which a set of probes is deposited wherein the set comprises: (a) probes capable of specifically hybridising with nucleic acids encoding fucosyltransferases; (b) probes capable of specifically hybridising with nucleic acids encoding galactosyltransferases; (c) probes capable of specifically hybridising with nucleic acids encoding N-acetylglucosaminyltransferases; (d) probes capable of specifically hybridising with nucleic acids encoding N-acetylgalactosaminyltransferases; (e) probes capable of specifically hybridising with nucleic acids encoding sialyltransferases; (f) probes capable of specifically hybridising with nucleic acids encoding sugar sulfotransferases; (g) probes capable of specifically hybridising with nucleic acids encoding lectins; (h) probes capable of specifically hybridising with nucleic acids encoding selectins; (i) probes capable of specifically hybridising with nucleic acids encoding fucosidases; (j) probes capable of specifically hybridising with nucleic acids encoding neuraminidases (sialidases); (k) probes capable of specifically hybridising with nucleic acids encoding nucleotide sugar epimerases; (l) probes capable of specifically hybridising with nucleic acids encoding sugar kinases; (m) probes capable of specifically hybridising with nucleic acids encoding sugar epimerases; (n) probes capable of specifically hybridising with nucleic acids encoding sugar transporters; and (o) probes capable of specifically hybridising with nucleic acids encoding enzymes of the fucose or sialic acid metabolism. The invention further relates to a kit which comprises the probes of the invention and the use of the support or the kit of the invention for the quantitative determination of expression profiles in a sample obtained from a cell, a tissue or an organism. The present invention further relates to a diagnostic composition and the use of the set of probes of the invention for the preparation of diagnostic compositions or of a diagnostic apparatus for the diagnosis of tumours, inflammatory and/or neurological diseases.

[0002] A number of documents including patent applications and manufacturers' instructions of the prior art are mentioned in the description. While the disclosure content of these documents is not considered relevant for the patentability of the invention, it is incorporated by reference into the present description.

[0003] An essential post-translational modification is glycosylation by which sugars are enzymatically attached to proteins. Glycosylation serves different functions, such as the stabilisaton of proteins by protection against proteolytic degradation. Also the correct protein conformation and the affinity to binding partners associated therewith may depend on glycosylation. The glycosylation of proteins further affects their intracellular transport, contributes to cell interaction or serves as a structural component of cell membranes. The most important sugars that play a role in glycoproteins are fucose, galactose, mannose, glucose, xylose, N-acetylgalactosamine, N-acetylglucosamine and N-acetylneuraminic acid. The binding to proteins can be N-glycosidic or O-glycosidic. N-glycosylation occurs at the endoplasmatic reticulum by the binding of a sugar to the free amino group of asparagine. O-glycosylation, however, occurs at the Golgi apparatus by binding of the sugar to the hydroxyl group of serine, threonine, hydroxyproline or hydroxylysine.

[0004] The structure of the specific glycosylation pattern of a cell depends on the expression as well as on the activity of the molecules of the glycosylation machinery, such as e.g. glycosyltransferases, degrading enzymes (e.g. sialidases), sugar transporters and glycoprotein-binding molecules. The large number of glycosyltransferases described is presumably caused by the high three-fold specificity of glycosyltransferases. These are specific for i) the substrate, i.e. the sugar that is transferred, ii) the acceptor to which the sugar is transferred and iii) the type of bond that is established between the two partners.

[0005] Sialyltransferases, which catalyse the transfer of a nucleotide-activated sialic acid to specific sugar side-chains, play an important role for glycoprotein-producing cells, since the terminal sialic acid is very important for the biological activity and/or half-life of glycoproteins. The expression of sialyltransferases also plays an important role in the diagnostic of tumour diseases.

[0006] Also enzymes and transporters which play an important role in sugar metabolism, can be of significant importance for the diagnosis of different diseases. Furthermore, these enzymes and transporters are of interest for the recombinant production of glycoproteins.

[0007] Another important group of molecules are lectins, such as galectins, selectins and sialic acid-binding lectins. These lectins are the receptors for the sugar side-chains on the cell membrane. Many of these lectins are involved in immunological recognition mechanisms and, for example, the induction of apoptosis/anoikis.

[0008] Specific changes of the glycan structure on the cell surface are characteristic of a number of diseases and, thus, may be used for their diagnosis. One example is the early diagnosis of carcinomas having an increased metastasic potential. Liver cells, for example, carry receptors on their surface which bind specific glycoproteins and, in this way, regulate the half-life of serum proteins. The Thomsen Friedenreich TF glycan, which is present on the surface of tumour cells, is bound by the receptors and facilitates the metastasis of tumour cells into the liver. There is an interrelationship with sialyltransferase ST6GalNAc-II, the over-expression of which correlates with an increased presence of TF and is of prognostic relevance (Schneider et al., 2001). It has been known for some time that certain acidic sugars (sialic acids) increasingly occur in glycan structures of metastasizing tumour cells. This is consistent with the fact that also the activity of the enzyme catalyzing said structures (sialyltransferase ST6Gal-I) is increased in metastasizing colorectal carcinomas (Kemmner at al., 1994). Similar results were found in studies on gastric carcinomas, renal carcinomas and mamma carcinomas.

[0009] Other glycan structures are responsible for the binding of tumour cells circulating in the blood to specific receptors on endothelia of blood vessels, i.e. selectins. Also this process is very important in the metastasis of colorectal carcinoma and can be used to evaluate the prognosis for a patient. The selectins themselves are glycoproteins which normally initiate the glycan-depending interactions of leucocytes with the endothelium. These result in the migration of leucocytes into centres of inflammation. Thus, glycan structures are also important with respect to the organisation of the immune defence and have diagnostic potential also in this respect.

[0010] U.S. Pat. No. 6,566,060 analyses the expression of glycosyltransferases with the aim of determining the tumorigenic potential of brain cells and the treatment of neurological diseases.

[0011] US patent application no. US 2004/0204381 describes reagents and methods for the treatment and prevention of diseases that are caused by changes in the sialylation and glycosylation patterns of proteins.

[0012] US patent application 2003/0175734 describes materials and methods for the determination of the predisposition of cells to develop malignant phenotypes, in particular brain tumours. These methods are based on the analysis of expression patterns of oncogenes and tumour suppressor genes.

[0013] WO02059350 discloses the use of sialyltransferases, in particular sialyltransferase ST6GalNAc-II for the diagnosis and therapy of tumour diseases.

[0014] However, no approach is known in the prior art which allows the comprehensive analysis of the glycosylation apparatus.

[0015] Thus, the problem underlying the present invention was the provision of improved and/or modified means and methods for the analysis of the glycosylation apparatus. This problem is solved by the provision of the embodiments defined in the claims.

[0016] Consequently, the present invention relates to a support onto which a set of probes is deposited wherein the set comprises: (a) probes capable of specifically hybridising with nucleic acids encoding fucosyltransferases; (b) probes capable of specifically hybridising with nucleic acids encoding galactosyltransferases; (c) probes capable of specifically hybridising with nucleic acids encoding N-acetylglucosaminyltransferases; (d) probes capable of specifically hybridising with nucleic acids encoding N-acetylgalactosaminyltransferases; (e) probes capable of specifically hybridising with nucleic acids encoding sialyltransferases; (f) probes capable of specifically hybridising with nucleic acids encoding sugar sulfotransferases; (g) probes capable of specifically hybridising with nucleic acids encoding lectins; (h) probes capable of specifically hybridising with nucleic acids encoding selectins; (i) probes capable of specifically hybridising with nucleic acids encoding fucosidases; (j) probes capable of specifically hybridising with nucleic acids encoding neuraminidases (sialidases); (k) probes capable of specifically hybridising with nucleic acids encoding nucleotide sugar epimerases; (l) probes capable of specifically hybridising with nucleic acids encoding sugar kinases; (m) probes capable of specifically hybridising with nucleic acids encoding sugar epimerases; (n) probes capable of specifically hybridising with nucleic acids encoding sugar transporters; and (o) probes capable of specifically hybridising with nucleic acids encoding enzymes of the fucose or sialic acid metabolism.

[0017] The term “support” refers to a device having a surface onto which the probes of the invention can be deposited. This surface in accordance with the, invention may be a surface of any kind. The surface may be a coating which was applied onto the support or it may be the surface of the support itself. Suitable materials for the support are known to the person skilled in the art and include synthetic materials, glass, silica, gold, stainless steel, Teflon, nylon and silicon. Coatings in accordance with the invention, as far as they are used, include poly-L-lysin and aminosilan coatings as well as epoxide- and aldehyde-activated surfaces.

[0018] In a preferred embodiment, the support is miniaturised, for example in form of a chip, a disk, a bead or a microtitre plate. The support in accordance with the invention permits the parallel analysis of a plurality of individual detections in a small amount of sample material.

[0019] In a further preferred embodiment, each probe is assigned a defined coordinate in order to permit the evaluation of the results e.g. by using robot-assisted automated test procedures. The use of supports further avoids mixing or a “spill-over” of samples and, in addition, allows long-term preservation.

[0020] The term “probe” refers to a nucleic acid molecule which is preferably used in molecular biological hybridisation methods for sequence-specific detection of DNA and RNA molecules. The preparation of the probes can be carried out using any method known in the art, for example, the probes may be synthesised enzymatically and chemically. The probes can, for example, be synthesised directly onto the support by “in situ” synthesis using photolithography or ink-jet systems (Gao et al., 2001; Lausted et al., 2004) or can be deposited in a contact-free manner using piezoelectric or steel needles which deposit smallest amounts upon contact with the surface. The application of the probes can be carried out e.g. using spotting robots (Auburn et al., 2005).

[0021] In this context, nucleic acid molecule refers to all naturally occurring nucleic acid molecules, such as DNA or RNA, as well as to artificial base analogues, such as PNA (Peptide Nucleotide Acids; Harris and Winssinger, 2005) or LNA (Locked Nucleic Acids; Castoldi et al., 2006).

[0022] Fucosyltransferases (EC 2.4.1.-) belong to the group of glycosyltransferases, in particular to the group of hexosyltransferases, and catalyse the transfer of fucose from an activated sugar phosphate, e.g. GDP-fucose, to a protein or a sugar.

[0023] Galactosyltransferases (EC 2.4.1.-) belong to the group of glycosyltransferases, in particular to the group of hexosyltransferases, and catalyse the transfer of galactose from an activated sugar phosphate, UDP-galactose, to a protein or a sugar.

[0024] N-acetyl-glucosaminyltransferases (EC 2.4.1.-) belong to the group of glucosyltransferases, in particular to the group of hexosyltransferases, and catalyse the transfer of N-acetylglucosamin from an activated sugar phosphate, e.g. UDP-GlcNAc, to a protein or a sugar.

[0025] N-acetyl-galactosaminyltransferases (EC 2.4.1.-) belong to the group of glycosyltransferases, in particular to the group of hexosyltransferases, and catalyse the transfer of N-acetyl-galactosamine from an activated sugar phosphate, e.g. UDP-GalNAc, to a protein or a sugar.

[0026] Sialyltransferases (E 2.4.99.-) belong to the group of glycosyltransferases and catalyse the transfer of nucleotide-activated sialic acid, e.g. CMP-NeuAc, to a protein or a sugar.

[0027] Sugar sulfotransferases (EC 2.8.2) belong to the group of sulfotransferases and catalyse the transfer of a sulphate group of the nucleotide analogue 3′-phosphoadenosine-5′-phosphosulfate (PAPS) to a sugar.

[0028] Lectins are glycoproteins which are capable of specifically binding to sugar residues of cells and/or cell membranes and of inducing biochemical reactions from there. Lectins do not have enzymatic activity.

[0029] Selectins are a group of carbohydrate-binding adhesion molecules which are in particular involved in cell-cell-interactions of the immune system. In the context of an inflammation, selectins mediate for example the “rolling” of leucocytes on activated endothelial cells and contribute to the slowing of leucocyte velocity and their exit from the blood stream (Sperandio, 2006).

[0030] Fucosidases (EC 3.2.1.-) belong to the group of glycosidases and catalyse the hydrolytic cleavage of fucose from sugar residues.

[0031] Neuraminidases (EC 3.2.1.-) belong to the group of glycosidases and catalyse the hydrolytic cleavage of terminal sialic acid residues from glycoproteins on the cell surface. Neurominidases are also known to the person skilled in the art as sialidases.

[0032] Nucleotide sugar epimerases (EC 5.1.3.-) belong to the group of isomerases and catalyse the sterochemical transformation of a nucleotide sugar into its isomeric structure (i.e. molecules having the same empirical molecular formula, but different structural formulas).

[0033] Sugar kinases (EC 2.7.-.-) belong to the group of transferases, in particular phosphotransferases. Sugar kinases catalyse the phosphorylation of hydroxyl groups of sugar molecules.

[0034] Sugar epimerases (EC 5.1.3.-) belong to the group of isomerases and catalyse the stereochemical transformation of a sugar molecule into its isomeric structure (i.e. molecules having the same empirical molecular formula, but different structural formulas).

[0035] Sugar transporters are proteins which bind specific sugars and nucleotide-activated sugars, such as e.g. GDP-fucose, and serve to transport sugar. This includes the transport of sugar within the cell, e.g. from the cytoplasm to the Golgi apparatus or the endoplasmatic reticulum, as well as sugar transport from the extracellular space into the cell.

[0036] Enzymes of the fucose or sialic acid metabolism are part of the metabolic chain that catalyse the synthesis of sialic acid or fucose from glucose. Furthermore, the group of enzymes of the fucose or sialic acid metabolism also includes enzymes that catalyse the transformation of fucose and sialic acid taken-up by the cell to the nucleotide-activated sugars CMP-sialic acid and GDP-fucose. Enzymes of the fucose or sialic acid metabolism are, for example, N-acetylneuraminate synthase (NANS; EC 2.5.1.56), CMP-N-acetylneuraminic acid hydroxylase (CMAH; EC 1.14.18.2), N-acetylneuraminate pyruvate-lyase (NPL; EC 4.1.3.3), N-acetylglucosamine kinase (NAGK; EC 2.7.1.59), glucosamine (UDP-N-acetyl)-2-epimerase/N-acetylmannosamine kinase (GNE; EC 5.1.3.14), fucose-1-phosphate guanylyltransferase (FPGT; EC 2.7.11.1), cytidine monophosphate N-acetylneuraminic acid synthetase CMAS; EC 2.7.7.43), phosphoglucomutase 3 (PGM3; EC 5.4.2.3), UDP-galactose 4-epimerase (GALE; EC 5.1.3.2), transplantation antigen P35B (Fx/TSTA3; EC 1.1.1.271), fucokinase (FUK; EC 2.7.1.52), sialate-O-acetylesterase (SIAE/OAE; EC 3.1.1.53) and renin binding protein (RENBP; EC 5.1.3.8).

[0037] For the above-listed enzymes, reference was made to the classification according to the Enzyme Commission (EC) number system commonly used in the state of the art. In this system, each enzyme is assigned a code of four numbers. The first number refers to the enzyme class. In total, the enzymes are classified into 6 enzyme classes: oxidoreductases, transferases, hydrolases, lyases, isomerases and ligases. The other numbers provide an even more detailed characterisation of the enzymes, such as information about the substrates, the group transferred and the type of the bond formed or cleaved. This characterisation is hierarchical and depends on the individual enzyme class.

[0038] “Comprise” in accordance with the invention means that, apart from the probes mentioned additional probes, for example control probes, may be deposited onto the support. Control probes may be, for example, probes encoding genes of Aradopsis thaliana (thale cress) and to which human RNA does not bind. Thus, it is possible to control the efficiency of fluorescent labelling at the cDNA level and the equal quality of arrays by translating and hybridising exactly titered amounts of corresponding RNA of Arabidopsis thaliana with each analysis. Further examples of additional probes are inter alia “guidance spots” for correct positioning of the support and qualitative analysis of the results. Furthermore, probes may be used which bind nucleic acids the expression of which should not change in different tissues and cell lines (housekeeping gene) and which, thus, serve as internal controls.

[0039] Supports which contain only probes that specifically hybridise with nucleic acids encoding fucosyltransferases, galactotransferases, acetyl-glucosaminyl transferases, acetyl-galactosaminyl transferases, sialyltransferases, sugar sulfotransferases, lectins, selectins, fucosidases, neuraminidases (sialidases), nucleotide sugar epimerases, sugar kinases, sugar epimerases, sugar transporters and enzymes of the fucose or sialic acid metabolism, as defined above, are also taken into consideration.

[0040] The term “hybridise” in accordance with the invention refers to the binding of the probes of the invention to a complementary strand of polynucleotides whereby these form a hybrid. Methods for carrying out hybridisation experiments are known in the art and the person skilled in the art knows the conditions which have to be applied for hybridisation according to the invention. Such hybridisation techniques can be found in text books such as Sambrook, Russell “Molecular Cloning, A Laboratory Manual” Cold Spring Harbor Laboratory, N.Y. (2001); Ausubel, “Current Protocols in Molecular Biology”, Green Publishing Associates and Wiley Interscience, N.Y. (1989), or Higgins and Hames (Eds.) “Nucleic acid hybridization, a practical approach”, IRL Press Oxford, Washington D.C., (1985).

[0041] Stringent hybridisation conditions include conditions comprising e.g.: overnight incubation at 65° C. in 4×SSC (600 mM sodium chloride, 60 mM sodium citrate), followed by a washing step at 65° C. in 0.1×SSC for 1 hour. Alternatively, it is possible to incubate at 42° C. in a solution that contains 50% formamide, 5×SSC (750 mM sodium chloride, 75 mM sodium citrate), 50 mM sodium phosphate (pH 7.6), 5× Denhardt's solution, 10% dextrane sulphate and 20 μg/ml denatured, sheared DNA from salmon sperm, followed by washing steps in 0.1×SSC of 5 to 20 minutes at approximately 65° C. These hybridisation conditions are known to the person skilled in the art as highly stringent hybridisation conditions.

[0042] Less stringent conditions are also contemplated in accordance with the invention. Less stringent conditions for hybridisation and signal detection can be achieved, for example, by varying temperature or salt concentration. Low stringent hybridisation conditions are achieved e.g. by incubation at 50° C. in 4×SSC. Furthermore, changing the concentration of formamide can achieve less stringent conditions (lower formamide concentrations result in less stringent hybridisation), including, for example: an overnight incubation at 37° C. in a solution containing 30% formamide, 6×SSPE (20×SSPE=3 M NaCl, 0.2 M NaH₂PO₄, 0.02 M EDTA, pH 7.4), 0.5% SDS, 100 μg/ml DNA from salmon sperm and subsequent washing at 50° C. with 1×SSPE and 0.1% SDS. These conditions can be further varied by using alternative blocking reagents for the suppression of background signals. Such alternative blocking reagents are, for example, Denhardt's solution, BLOTTO, heparin, denatured DNA from salmon sperm as well as other commercially available reagents. If alternative blocking reagents are used, the hybridisation conditions may have to be adjusted to the respective experimental conditions.

[0043] Preferred probes of the invention are probes which, under stringent conditions, bind to a species of the above-mentioned nucleic acids without cross-reacting with other nucleic acids.

[0044] The term “probes capable of specifically hybridising with nucleic acids” refers to probes which, under suitable conditions, specifically hybridise with the relevant nucleic acids. Said suitable conditions preferably are stringent hybridisation conditions as defined above. In a preferred embodiment, a probe hybridises only with one nucleic acid, e.g. encoding for a specific fucosyltransferase or a specific galactosyltransferase. Alternatively, it is preferred that a probe hybridises with several nucleic acids of the same type of enzymes (e.g. fucolsyltransferases) for example when this type of enzyme is characterised by a common motif. In this regard, the term “type of enzyme” refers to a group of enzymes. Thus, for example, the fucosyltransferases defined in (a) represent one type of enzymes, likewise the galactosyltransferases defined in (b) etc. Of course, there are always several probe molecules of a species deposited on the support. The term “probes” also includes that only one specific probe sequence per enzyme or type of enzyme is deposited onto the support. In an alternative embodiment, several different probe sequences hybridising with different molecules of a type of enzymes (e.g. fucolsyltransferases) and/or with one enzyme of a type of enzymes, are deposited onto the support.

[0045] The support of the invention offers the advantage of a complete analysis of the molecules of the glycosylation machinery in one assay as well as the advantage that carrying out the analysis requires little time and small amounts of test material in comparison to other techniques. Thus, this comprehensive assay provides a sensitive, quick and parallel analysis of the components of the glycosylation apparatus based on micro-arrays. The arrays allow to detect the expression of all the glycosyltransferases and the other molecules of the glycosylation machinery within a short time and starting from a small number of cells. This is for example an advantage with respect to the diagnosis of tumour diseases or inflammatory and/or neurological diseases, in particular.

[0046] In accordance with the invention, the term “tumour” refers to the new formation of body tissues (neoplasias) which are formed due to a dysregulation of cell growth. A distinction is made between benign and malignant tumours.

[0047] Inflammatory diseases in accordance with the invention are diseases which represent a first reaction of the immune system to infections or stimuli, such as e.g. physical stimuli, microorganisms, allergens, toxins or dysfunctional enzymes, having the function to eliminate or remedy the damaging stimulus. Frequently occuring inflammatory diseases are, for example, arthritis, myocarditis, dermatitis, otitis, pneumonia, rheumatic diseases, Crohn's disease, ulcerative colitis, spondylitis, osteoarthritis or psoriasis.

[0048] Neurological diseases in accordance with the invention are diseases of the nervous system. The organ systems concerned are the central nervous system and the peripheral nervous system including the surrounding structures. Neurological diseases comprise, for example, multiple sclerosis, cerebral meningitis, inflammation of the spinal cord, cerebral infarction, Parkinson's disease, brain tumours, migraine, epileptic diseases, dementias and muscular dystrophies.

[0049] The determination of the expression of the glycosyltransferases in their entirety and other molecules of the glycosylation apparatus can also be advantageous for the analysis of glycosylation in production cell lines. Since glycans play a crucial role in the formation of correctly folded functional proteins, this expression analysis provides an innovative technology for the preparation of glycosylated biopharmaceuticals with optimised activity. The importance of this knowledge concerning the glycosylation patterns with respect to pharmacological bioactivity and bioavailability of proteins is particularly striking when, due to a lack of glycosylation or faulty glycosylation, the therapeutic use and success of recombinant proteins fall short of expectations.

[0050] A further advantage is the possibility of a simple and quick qualitative and quantitative determination of changes of the different molecules of the glycosylation apparatus that are expressed in a cell line subsequent to specific glyco-engineering. Cell lines often have to be subjected to additional glyco-engineering either to enhance specific glycosyltransferase activities and/or to exclude others. It is possible that other elements of the glycosylation machinery also react to such specific interventions. Thus, the comprehensive approach of the support of the invention offers the possibility to detect also surprising, unforeseen expression changes. Another advantage consists in the small amount of sample required since a single cell already provides sufficient test material. Thus, in comparison with standard methods such as sugar analysis by HPLC, the support of the invention provides a cost and labour saving method. Further advantages of the invention will be mentioned in connection with the preferred embodiments.

[0051] The invention further relates to a support onto which a set of probes is deposited, wherein the set comprises: (a) probes capable of specifically hybridising with nucleic acids encoding fucosyltransferases; (b) probes capable of specifically hybridising with nucleic acids encoding galactosyltransferases; (c) probes capable of specifically hybridising with nucleic acids encoding N-acetylglucosaminyltransferases; (d) probes capable of specifically hybridising with nucleic acids encoding N-acetylgalactosaminyltransferases; (e) probes capable of specifically hybridising with nucleic acids encoding sialyltransferases; (f) probes capable of specifically hybridising with nucleic acids encoding sugar sulfotransferases; (g) probes capable of specifically hybridising with nucleic acids encoding lectins; (h) probes capable of specifically hybridising with nucleic acids encoding selectins; (i) probes capable of specifically hybridising with nucleic acids encoding fucosidases; (j) probes capable of specifically hybridising with nucleic acids encoding neuraminidases (sialidases); (k) probes capable of specifically hybridising with nucleic acids encoding nucleotide sugar epimerases; (l) probes capable of specifically hybridising with nucleic acids encoding sugar kinases; (m) probes capable of specifically hybridising with nucleic acids encoding sugar epimerases; (n) probes capable of specifically hybridising with nucleic acids encoding sugar transporters; and/to (o) probes capable of specifically hybridising with nucleic acids encoding enzymes of the fucose or sialic acid metabolism, wherein at least one probe selected from (k), (l) or (m) is contained in the set of probes.

[0052] The characterising features of this embodiment are as defined above.

[0053] According to the invention, the term “wherein at least one probe selected from (k), (l) or (m) is contained in the set of probes” refers to a set of probes containing at least probes that are capable of specifically hybridising with nucleic acids encoding nucleotide sugar epimerases; and/or probes that are capable of specifically hybridising with nucleic acids encoding sugar kinasases and/or probes that are capable of specifically hybridising with nucleic acids encoding sugar epimerases. In a preferred embodiment, the set contains probes capable of specifically hybridising with nucleic acids encoding nucleotide sugar epimerases and probes capable of specifically hybridising with nucleic acids encoding sugar kinases as well as probes capable of specifically hybridising with nucleic acids encoding sugar epimerases. According to the invention, the set of probes may comprise further probes as mentioned under (a) to (j) and (n) to (o) in any possible combination.

[0054] As shown in the Examples 2 and 4 below based on the example of the key enzyme of sialic acid synthesis (UDP-N-acetylgucosamine-2-epimerase/N-acetylmannosamine kinase (GNE)), the analysis of the mRNA expression profile of sugar kinases and sugar epimerases can be used to derive direct information about the glycosylation pattern, in this case the density of sialic acid, on the cell surface.

[0055] In a preferred embodiment the support is a solid support.

[0056] A solid support in accordance with the invention is a support characterised by high stability and the possibility of miniaturisation.

[0057] In a further preferred embodiment, the support is made of glass.

[0058] In another preferred embodiment, the probes are oligonucleotide probes. Oligonucleotide probes in accordance with the invention have a length of at least 30 nucleotides. Oligonucleotide probes can be produced in a molecular biological way or synthetically (such as, for example, the oligonucleotide probes used by Affymetrix, U.S. Pat. Nos. 5,445,934 and 5,744,305). In another preferred embodiment, a protein in accordance with the invention can be represented by several different oligonucleotides.

[0059] In another preferred embodiment, probes are deposited onto the support that have a length of 40 to 100 bases. In a more preferred embodiment, the probes have a length of 50 to 90 bases, even more preferably a length of 60 to 80 bases and most preferably a length of approximately 70 bases. All values within these ranges, e.g. probes having a length of 62, 65, 68, 72, 75 or 78 bases are explicitly comprised by the preferred embodiments.

[0060] In another preferred embodiment of the support of the invention, fucosyltransferases, galactotransferases, acetyl-glucosaminyl transferases, acetyl-galactosaminyl transferases, sialyltransferases, sugar sulfotransferases, lectins, selectins, fucosidases, neuraminidases (sialidases), nucleotide sugar epimerases, sugar kinases, sugar epimerases, sugar transporters and/or enzymes of the fucose or sialic acid metabolism are selected from Table 1.

TABLE 1
Gene list of fucosyltransferases, galactosyltransferases, acetyl-glucosaminyl transferases,
acetyl-galactosaminyltransferases, sialyltransferases, sugar-sulfotransferasen, lectins, selectins,
fucosidases, neuraminidases (sialidases), nucleotide sugar epimerases, sugar kinases, sugar
epimerases, sugar transporters and/or enyzmes of the fucose or sialic acid metabolism.

| | | | SEQ ID | SEQ ID | SEQ ID |
|---|---|---|---|---|---|
| GlycoGene | Database No. | Gene name | NO: | Oligo 1 | Oligo 2 |
| SEPT9 | NM_006640 | Homo sapiens Septin 9 | 128 | 368 | |
| | GI:19923366 | | | | |
| A4GALT | NM_017436 | Homo sapiens alpha-1,4- | 1 | 207 | |
| | GI:55956926 | galactosyltransferase | | | |
| | | (globotriaosylceramide synthase) | | | |
| A4GNT | NM_016161.1 | Homo sapiens alpha-1,4-N- | 2 | 208 | |
| | GI:7705858 | acetylglucosaminyltransferase | | | |
| ACT | NM_001101 | beta-Actin | 179 | 209 | 417 |
| AFG3L2 | NM_006796 | Homo sapiens AFG3 (ATPase family | 3 | 210 | |
| | GI:5802969 | gene 3-like 2; yeast); nuclear gene, | | | |
| | | coding for mitochondrial protein | | | |
| ANXA4 | NM_001153 | Homo sapiens annexin A4 | 4 | 211 | 418 |
| | GI:4809272 | | | | |
| ARAF | NM_001654 | Homo sapiens v-raf murine sarcoma | 5 | 212 | 419 |
| | GI:4502192 | 3611 viral oncogene, homologous | | | |
| B2M | NM_004048 | Homo sapiens beta-2-microglobulin | 6 | 213 | |
| | GI:37704380 | | | | |
| B3GALNT1 | NM_003781 | Homo sapiens UDP-Gal:betaGlcNAc | 188 | 214 | |
| | GI:84452144 | beta-1,3-galactosyltransferase, | | | |
| | | polypeptide 3 (globoside blood group) | | | |
| | | (B3GALT3), transcript variant 1 | | | |
| B3GALNT2 | NM_152490 | Homo sapiens UDP-GalNAc:betaGlcNAc | 7 | 215 | |
| | GI:22749020 | beta-1,3-galactosaminyltransferase, | | | |
| | | polypeptide 2 | | | |
| B3GALT1 | NM_020981 | UDP-Gal:betaGlcNAc beta-1,3- | 8 | 216 | |
| | GI:15451870 | galactosyltransferase, polypeptide 1 | | | |
| B3GALT2 | NM_003783 | Homo sapiens UDP-Gal:betaGlcNAc | 9 | 217 | |
| | GI:15451871 | beta-1,3-galactosyltransferase, | | | |
| | | polypeptide 2 | | | |
| B3GALT4 | NM_003782 | Homo sapiens UDP-Gal:betaGlcNAc | 10 | 218 | |
| | GI:51702476 | beta-1,3-galactosyltransferase, | | | |
| | | polypeptide 4 | | | |
| B3GALT5 | NM_006057 and | Homo sapiens UDP-Gal:betaGlcNAc | 180; 466 | 219 | |
| | NM_033173 | beta-1,3-galactosyltransferase, | | | |
| | | polypeptide 5 | | | |
| B3GALT6 | NM_080605 | Homo sapiens UDP-Gal:betaGal | 11 | 220 | |
| | GI:37537720 | beta-1,3-galactosyltransferase, | | | |
| | | polypeptide 6 | | | |
| B3GNT1 | NM_006876.2 | Homo sapiens UDP-GlcNAc:betaGal | 12 | 221 | |
| | GI:92091577 | beta-1,3-N- | | | |
| | | acetylglucosaminyltransferase 1 | | | |
| B3GNT2 | NM_006577 | Homo sapiens UDP-GlcNAc:betaGal | 13 | 222 | 420 |
| | GI:92091578 | Beta-1,3-N- | | | |
| | | acetylglucosaminyltransferase | | | |
| B3GNT3 | NM_014256 | Homo sapiens UDP-GlcNAc:betaGal | 14 | 223 | |
| | GI:92091603 | beta-1,3-N- | | | |
| | | acetylglucosaminyltransferase 3 | | | |
| B3GNT4 | NM_030765 | Homo sapiens UDP-GlcNAc:betaGal | 15 | 224 | |
| | GI:42544235 | beta-1,3-N- | | | |
| | | acetylglucosaminyltransferase 4 | | | |
| B3GNT5 | NM_032047 | Homo sapiens UDP-GlcNAc:betaGal | 16 | 225 | 421 |
| | GI:44680131 | beta-1,3-N- | | | |
| | | acetylglucosaminyltransferase 5 | | | |
| B3GNT6 | NM_138706 | Homo sapiens UDP-GlcNAc:betaGal | 17 | 226 | |
| | GI:47271458 | beta-1,3-N- | | | |
| | | acetylglucosaminyltransferase 6 | | | |
| B3GNT7 | NM_145236 | Homo sapiens UDP-GlcNAc:betaGal | 18 | 227 | |
| | GI:21687138 | beta-1,3-N- | | | |
| | | acetylglucosaminyltransferase 7 | | | |
| B3GNT8 | NM_198540 | Homo sapiens UDP-GlcNac:betaGal | 19 | 228 | |
| | GI:42821106 | beta-1,3-N- | | | |
| | | acetylglucosaminyltransferase 8 | | | |
| B3GNTL1 | NM_001009905 | Homo sapiens UDP-GlcNAc:betaGal | 20 | 229 | |
| | GI:57770467 | beta-1,3-N- | | | |
| | | acetylglucosaminyltransferase-like 1 | | | |
| B4GALNT1 | NM_001478 | Homo sapiens beta-1,4-N- | 21 | 230 | 422 |
| | GI:84781815 | acetylgalactosaminyltransferase 1 | | | |
| B4GALNT2 | NM_153446.1\| | Homo sapiens beta-1,4-N- | 22 | 231 | |
| | [23592223] | acetylgalactosaminyltransferase 2 | | | |
| B4GALNT3 | NM_173593.3 | Homo sapiens beta-1,4-N- | 23 | 232 | 423 |
| | | acetylgalactosaminyltransferase 3 | | | |
| B4GALNT4 | NM_178537.3 | Homo sapiens beta-1,4-N- | 24 | 233 | |
| | | acetylgalactosaminyltransferase 4 | | | |
| B4GALT1 | NM_001497 | Homo sapiens UDP-Gal:betaGlcNAc | 25 | 234 | 424 |
| | GI:13929461 | beta-1,4-galactosyltransferase, | | | |
| | | polypeptide 1 | | | |
| B4GALT2 | NM_003780.3 | Homo sapiens UDP-Gal:betaGlcNAc | 26 | 235 | |
| | GI:53759111 | beta-1,4-galactosyltransferase, | | | |
| | | polypeptide 2 | | | |
| B4GALT3 | NM_003779 | Homo sapiens UDP-Gal:betaGlcNAc | 27 | 236 | |
| | GI:13929468 | beta-1,4-galactosyltransferase | | | |
| | | polypeptide 3 | | | |
| B4GALT4 | NM_003778 | Homo sapiens UDP-Gal:betaGlcNAc | 28 | 237 | |
| | GI:47078256 | beta-1,4-galactosyltransferase, | | | |
| | | polypeptide 4, transcript variant 2 | | | |
| B4GALT5 | NM_004776.2 | Homo sapiens UDP-Gal:betaGlcNAc | 29 | 238 | |
| | GI:13929470 | beta-1,4-galactosyltransferase, | | | |
| | | polypeptide 5 | | | |
| B4GALT6 | NM_004775.2 | Homo sapiens UDP-Gal:betaGlcNAc | 30 | 239 | |
| | GI:13929471 | beta-1,4-galactosyltransferase, | | | |
| | | polypeptide 6 | | | |
| B4GALT7 | NM_007255 | Homo sapiens xylosyl protein beta- | 31 | 240 | |
| | GI:6005951 | 1,4-galactosyltransferase, | | | |
| | | polypeptide 7 | | | |
| C1GALT1 | NM_020156 | Homo sapiens ‘core 1’ synthase, | 32 | 241 | |
| | GI:9910143 | glycoprotein-N-acetylgalactosamine | | | |
| | | 3-beta-galactosyltransferase, 1 | | | |
| C1GALT1C1 | NM_152692 | Homo sapiens C1GALT1-specific | 33 | 242 | 425 |
| | GI:58532585 | chaperon 1, transcript variant 1 | | | |
| CD44 | NM_000610 | Homo sapiens CD44 molecule (Indian | 202 | 243 | |
| | gi\|48255934\| | blood group), transcript variant 1 | | | |
| CD69 | NM_001781 | Homo sapiens CD69 molecule | 36 | 244 | 426 |
| | GI:4502680 | | | | |
| CDC2L1 | NM_033488-1 | Homo sapiens CDC2-like 1 (PITSLRE | 37 | 245 | |
| | GI:16332361 | Proteine), transcript variant 4 | | | |
| CDC2L2 | NM_024011 | Homo sapiens CDC2-like 2 (PITSLRE | 38 | 246 | |
| | GI:16357497 | proteins), transcript variant 1 | | | |
| CDH17 | NM_004063 | Homo sapiens cadherin 17, LI | 39 | 247 | |
| | GI:16507959 | cadherin (liver-intestine) | | | |
| CHPF | NM_024536 | Homo sapiens chondroitin | 191 | 248 | |
| | | polymerizing factor | | | |
| CHST4 | NM_005769 | Homo sapiens carbohydrate (N- | 40 | 249 | |
| | GI:5031734 | acetylglucosamine 6-O) | | | |
| | | sulfotransferase 4 | | | |
| CHST5 | NM_012126 | Homo sapiens carbohydrate (N- | 194 | 250 | |
| | GI:6912305 | acetylglucosamin 6-O) | | | |
| | | sulfotransferase 5 | | | |
| CHST6 | NM_021615 | human corneal N-acetylglucosamine | 41 | 251 | 427 |
| | GI:52851439 | 6-O sulfotransferase (hCGn6ST) | | | |
| CHST8 | NM_022467 | Homo sapiens carbohydrate (N- | 42 | 252 | |
| | GI:21361615 | acetylgalactosamin 4-0) | | | |
| | | sulfotransferase 8 | | | |
| CHST9 | NM_031422 | Homo sapiens carbohydrate (N- | 43 | 253 | |
| | GI:13899234 | acetylgalactosamin 4-0) | | | |
| | | sulfotransferase 9 | | | |
| CHSY1 | NM_014918 | Homo sapiens carbohydrate | 189 | 254 | |
| | | (chondroitin) synthase 1 | | | |
| CHSY-2/CSS1 | NM_175856 | Homo sapiens chondroitin synthase 2 | 181 | 255 | |
| CLEC2B | NM_0005127 | Homo sapiens C-type lectin domain | 397 | 256 | |
| | GI:37577106 | family 2, B | | | |
| CLEC7A | NM_197954 | Homo sapiens C-type lectin domain | 206 | 257 | |
| | GI:88999595 | family 7, A, transcript variant 6 | | | |
| CMAH | NR_002174 | Homo sapiens CMP-N- | 186 | 258 | |
| | GI:3800813 | acetylneuraminic acid hydroxylase | | | |
| | | mRNA | | | |
| CMAS | NM_018686 | Homo sapiens cytidine- | 44 | 259 | |
| | GI:22027483 | monophosphat N-acetylneuraminic | | | |
| | | acid synthetase | | | |
| CSGALNACT1 | NM_018371 | Homo sapiens chondroitin beta-,4 N- | 205 | 260 | |
| | | acetylgalactosaminyltransferase | | | |
| | | (ChGn) | | | |
| CSGALNACT2 | NM_018590 | Homo sapiens mRNA for beta-1,4-N- | 199 | 261 | |
| | | acetylgalactosaminyltransferase | | | |
| CSS2 | AB086062 | Homo sapiens mRNA for chondroitin | 193 | 262 | |
| | | sulfate synthase | | | |
| CXADR | NM_001338 | Homo sapiens Coxsackie virus and | 45 | 263 | 428 |
| | GI:45827793 | adenovirus receptor | | | |
| DPAGT1 | NM_203316 | Homo sapiens dolichyl phosphate | 46 | 264 | |
| | GI:42794010 | (UDP-N-Acetylglucosamine) N- | | | |
| | | acetylglucosamine | | | |
| | | phosphotransferase 1 (GlcNAc-1-P | | | |
| | | transferase) | | | |
| DSP | NM_004415 | Homo sapiens desmoplakin, | 47 | 265 | |
| | GI:58530839 | transcript variant 1 | | | |
| ECOP | NM_030798 | Homo sapiens EGFR-co-amplified | 178 | 266 | |
| | GI:31542523 | and over-expressed protein | | | |
| ETFB | NM_001985 | Homo sapiens electron transfer | 48 | 267 | 429 |
| | GI:62420878 | flavoprotein, beta polypeptide, | | | |
| | | transcript variant 1 | | | |
| FPGT | NM_003838 | Homo sapiens fucose-1-phosphate | 49 | 268 | |
| | | guanylyltransferase | | | |
| FUCA1 | NM_000147 | Homo sapiens fucosidase, alpha-L- 1, | 50 | 269 | 430 |
| | GI:24475878 | tissue | | | |
| FUCA2 | NM_032020 | Homo sapiens fucosidase, alpha-L- 2, | 182 | 270 | |
| | | plasma | | | |
| FucT1/SLC35C1 | NM_018389 | Homo sapiens ‘solute carrier’ | 187 | 271 | |
| | | family 35, C1, putative GDP-fucose | | | |
| | | transporter | | | |
| FUK | NM_145059 | Homo sapiens fucokinase | 51 | 272 | |
| FUT1 | NM_000148 | Homo sapiens fucosyltransferase 1 | 52 | 273 | 431 |
| | GI:58331243 | (galactoside 2-alpha-L- | | | |
| | | fucosyltransferase, blood group H) | | | |
| FUT10 | NM_032664 | Homo sapiens fucosyltransferase 10 | 53 | 274 | 432 |
| | GI:40805105 | (alpha (1,3) fucosyltransferase) | | | |
| FUT11 | NM_173540 | Homo sapiens fucosyltransferase 11 | 54 | 275 | |
| | GI:27734920 | (alpha (1,3) fucosyltransferase) | | | |
| FUT2 | NM_000511 | Homo sapiens fucosyltransferase 2 | 55 | 276 | 433 |
| | GI:56711329 | (including secretor status) | | | |
| FUT3 | NM_000149 | Homo sapiens fucosyltransferase 3 | 56 | 277 | 434 |
| | GI:4503808 | (galactoside 3(4)-L- | | | |
| | | fucosyltransferase, Lewis blood group) | | | |
| FUT4 | NM_002033 | Homo sapiens fucosyltransferase 4 | 57 | 278 | 435 |
| | GI:50845425 | (alpha (1,3) fucosyltransferase, | | | |
| | | myeloid specific) | | | |
| FUT5 | NM_002034 | Homo sapiens fucosyltransferase 5 | 58 | 279 | 436 |
| | GI:52485798 | (alpha (1,3) fucosyltransferase) | | | |
| FUT6 | NM_000150.1 | Homo sapiens fucosyltransferase 6 | 60 | 280 | 437 |
| | | (alpha (1,3) fucosyltransferase) | | | |
| FUT7 | NM_004479 | Homo sapiens fucosyltransferase 7 | 59 | 281 | |
| | GI:56090657 | (alpha (1,3) fucosyltransferase) | | | |
| FUT8 | NM_004480 | Homo sapiens fucosyltransferase 8 | 61 | 282 | 438 |
| | GI:30410721 | (alpha (1,6) fucosyltransferase), | | | |
| | | transcript variant 4 | | | |
| FUT9 | NM_006581 | Homo sapiens fucosyltransferase 9 | 62 | 283 | |
| | GI:36951077 | (alpha (1,3) fucosyltransferase) | | | |
| Fx/TSTA3 | NM_003313 | Homo sapiens tissue specific | 197 | 284 | |
| | | transplantation antigen P35B | | | |
| GAK | NM_005255 | Homo sapiens cyclin G-associated | 63 | 285 | |
| | GI:4885250 | kinase | | | |
| GAL3ST2 | NM_022134 | Homo sapiens galactose-3-O- | 61 | 286 | |
| | GI:11545866 | sulfotransferase 2 | | | |
| GALE | NM_001008216 | Homo sapiens UDP-galactose-4- | 65 | 287 | |
| | GI:56118216 | epimerase, transcript variant 2 | | | |
| GALNT1 | NM_020474 | Homo sapiens UDP-N-acetyl-alpha- | 66 | 288 | |
| | GI:13124890 | D-galactosamine: polypeptide N- | | | |
| | | acetylgalactosaminyltransferase | | | |
| | | (GalNAc-T) | | | |
| GALNT10 | NM_017540 | Homo sapiens UDP-N-acetyl-alpha- | 67 | 289 | |
| | GI:38788170 | D-galactosamine: polypeptide N- | | | |
| | | acetylgalactosaminyltransferase 10 | | | |
| | | (GalNAc-T10) | | | |
| GALNT11 | NM_022087 | Homo sapiens UDP-N-acetyl-alpha- | 68 | 290 | |
| | GI:11545800 | D-galactosamine: polypeptide N- | | | |
| | | acetylgalactosaminyltransferase 11 | | | |
| | | (GalNAc-T11) | | | |
| GALNT12 | NM_024642 | Homo sapiens UDP-N-acetyl-alpha- | 69 | 291 | |
| | GI:22203764 | D-galactosamine: polypeptide N- | | | |
| | | acetylgalactosaminyltransferase 12 | | | |
| | | (GalNAc-T12) | | | |
| GALNT13 | NM_052917 | Homo sapiens GALNT-13 mRNA for | 196 | 292 | |
| | | UDP-N-acetyl-apha-D- | | | |
| | | galactosamine: polypeptide | | | |
| | | N-acetylgalactosaminyltransferase | | | |
| | | 13, complete | | | |
| GALNT14 | NM_024572 | Homo sapiens UDP-N-acetyl-alpha- | 184 | 293 | |
| | | D-galactosamine: polypeptide N- | | | |
| | | acetylgalactosaminyltransferase 14 | | | |
| | | (GalNAc-T14) (GALNT14) | | | |
| GALNT15/ | NM_054110 | Homo sapiens UDP-N-acetyl-alpha- | 183 | 294 | |
| GALNTL2 | | D-galactosamine: polypeptide N- | | | |
| | | acetylgalactosaminyltransferase-like | | | |
| | | 2 | | | |
| GALNT17 | NM_001034845 | Homo sapiens GALNT17 mRNA for | 192 | 295 | |
| | | UDP-N-acetyl-alpha-D- | | | |
| | | galactosamine: polypeptide N- | | | |
| | | acetylgalactosaminyltransferase 17 | | | |
| GALNT2 | NM_004481 | Homo sapiens UDP-N-acetyl-alpha- | 70 | 296 | |
| | GI:9945385 | D-galactosamine: polypeptide N- | | | |
| | | acetylgalactosaminyltransferase | | | |
| | | (GalNAc-T) | | | |
| GALNT3 | NM_004482 | Homo sapiens UDP-N-acetyl-alpha- | 71 | 297 | |
| | GI:9945386 | D-galactosamine: polypeptide N- | | | |
| | | acetylgalactosaminyltransferase | | | |
| | | (GalNAc-T) | | | |
| GALNT4 | NM_003774 | Homo sapiens UDP-N-acetyl-alpha- | 72 | 298 | |
| | GI:34452724 | D-galactosamine: polypeptide N- | | | |
| | | acetylgalactosaminyltransferase 4 | | | |
| | | (GalNAc-T4) | | | |
| GALNT5 | NM_014568 | Homo sapiens UDP-N-acetyl-alpha- | 175 | 299 | |
| | | D-galactosamine: polypeptide N- | | | |
| | | acetylgalactosaminyltransferase 5 | | | |
| | | (GalNAc-T5) | | | |
| GALNT6 | NM_007210 | Homo sapiens UDP-N-acetyl-alpha- | 73 | 300 | |
| | GI:13124893 | D-galactosamine: polypeptide N- | | | |
| | | acetylgalactosaminyltransferase 6 | | | |
| | | (GalNAc-T6) | | | |
| GALNT7 | NM_017423 | Homo sapiens UDP-N-acetyl-alpha- | 74 | 301 | 439 |
| | GI:8393408 | D-galactosamine: polypeptide N- | | | |
| | | acetylgalactosaminyltransferase | | | |
| | | (GalNAc-T) | | | |
| GALNT8 | NM_017417 | Homo sapiens UDP-N-acetyl-alpha- | 75 | 302 | |
| | GI:8393411 | D-galactosamine: polypeptide N- | | | |
| | | acetylgalactosaminyltransferase 8 | | | |
| | | (GalNac-T8) | | | |
| GALNT9 | NM_021808 | Homo sapiens UDP-N-acetyl-alpha- | 76 | 303 | |
| | GI:38327555 | D-galactosamine: polypeptide N- | | | |
| | | acetylgalactosaminyltransferase 9 | | | |
| | | (GalNAc-T9) | | | |
| GALNTL1/ | NM_020692 | Homo sapiens UDP-N-acetyl-alpha- | 169 | 304 | |
| GALNT16 | | D-galactosamine: polypeptide N- | | | |
| | | acetylgalactosaminyltransferase-like | | | |
| | | 1 | | | |
| GALNTL4 | NM_198516 | Homo sapiens UDP-N-acetyl-alpha- | 83 | 305 | |
| | GI:38348337 | D-galactosamine: polypeptide N- | | | |
| | | acetylgalactosaminyltransferase-like | | | |
| | | 4 | | | |
| GALNTL5 | NM_145292 | Homo sapiens UDP-N-acetyl-alpha- | 173 | 306 | |
| | | D-galactosamine: polypeptide N- | | | |
| | | acetylgalactosaminyltransferase-like | | | |
| | | 5 | | | |
| GAPDH | NM_002046 | Homo sapiens glyceraldehyde-3- | 185 | 307 | 440 |
| | GI:83641890 | phosphate dehydrogenase | | | |
| GCNT1 | NM_001490 | Homo sapiens glucosaminyl (N- | 84 | 308 | 441 |
| | GI:34485725 | acetyl) transferase 1, ‘core’ 2 (beta- | | | |
| | | 1′,6-N-acetylglucosaminyltransferase) | | | |
| GCNT2 | NM_145649 | Homo sapiens glucosaminyl (N- | 468; 467 | 309 | 442 |
| | GI:85790494 and | acetyl) transferase 2, I-branching | | | |
| | NM_145655 | enzyme (blood group I) | | | |
| GCNT3 | NM_004751 | Homo sapiens glucosaminyl (N- | 85 | 310 | 443 |
| | GI:4758421 | acetyl) transferase 3, mucin type | | | |
| GCNT4 | NM_016591.1 | Homo sapiens glucosaminyl (N- | 77 | 311 | |
| | GI:7706126 | acetyl) transferase 4, ‘core’ 2 | | | |
| GLB1 | NM_000404 | Homo sapiens galactosidase, beta 1, | 86 | 312 | 444 |
| | GI:10834965 | transcript variant 179423 | | | |
| GNE | NM_005476 | Homo sapiens glucosamine (UDP-N- | 87 | 313 | 445 |
| | GI:38788307 | acetyl)-2-epimerase/N- | | | |
| | | acetylmannosamine kinase | | | |
| GNPTG | NM_032520 | Homo sapiens N-acetylglucosamine- | 88 | 314 | |
| | GI:42476109 | 1-phosphate transferase, gamma- | | | |
| | | subunit | | | |
| GPAA1 | NM_003801 | Homo sapiens homologue to GPAA1 | 89 | 315 | |
| | GI:83367079 | (glycosylphosphatidylinositol-anchor | | | |
| | | attachment protein 1) of yeast | | | |
| HDAC1 | NM_004964 | Homo sapiens histone deacetylase 1 | 90 | 316 | 446 |
| | GI:13128859 | | | | |
| HSP90AB1 | NM_007355 | Homo sapiens heat shock protein | 198 | 317 | |
| (HSPCB) | GI:20149593 | 90 kDa alpha (cytosolic), class B, 1 | | | |
| IGnT2 | AB078432 | Homo sapiens mRNA for beta-1,6-N- | 195 | 318 | |
| | | acetylglucosaminyltransferase 2 | | | |
| ITLN1 | NM_017625 | Homo sapiens intelectin 1 | 91 | 319 | |
| | GI:31542985 | (galactofuranose-binding) | | | |
| ITLN2 | NM_080878 | Homo sapiens intelectin 2 | 92 | 320 | |
| | GI:37622351 | | | | |
| KDELR1 | NM_006801 | Homo sapiens KDEL (Lys-Asp-Glu- | 93 | 321 | |
| | GI:32307173 | Leu) endoplasmic reticulum protein | | | |
| | | retention receptor 1 | | | |
| KDELR2 | NM_006854 | Homo sapiens KDEL (Lys-Asp-Glu- | 94 | 322 | |
| | GI:8051609 | Leu) endoplasmic reticulum protein | | | |
| | | retention receptor 2 | | | |
| KIAA0174 | NM_014761 | Homo sapiens KIAA0174 | 95 | 323 | |
| | GI:41281488 | | | | |
| LGALS1 | NM_002305 | Homo sapiens lectin, galactoside- | 96 | 324 | 447 |
| | GI:85815826 | binding, soluble, 1 (Galectin 1) | | | |
| LGALS10/ | NM_001828 | Homo sapiens Charcot-Leyden | 172 | 325 | |
| CLC | | crystal protein | | | |
| LGALS12 | NM_033101 | Homo sapiens lectin, galactoside- | 97 | 326 | |
| | GI:20127658 | binding, soluble, 12 (Galectin 12) | | | |
| LGALS13 | NM_013268 | Homo sapiens lectin, galactoside- | 98 | 327 | |
| | GI:20302163 | binding, soluble, 13 (Galectin 13) | | | |
| LGALS14 | NM_020129 | Homo sapiens lectin, galactoside- | 99 | 328 | |
| | GI:45439323 | binding, soluble, 14 transcript | | | |
| | | variant 1 | | | |
| LGALS2 | NM_006498 | Homo sapiens lectin, galactoside- | 100 | 329 | |
| | GI:51173752 | binding, soluble, 2 (Galectin 2) | | | |
| LGALS3 | NM_002306 | Homo sapiens lectin, galactoside- | 101 | 330 | 448 |
| | GI:4504982 | binding, soluble, 3 (Galectin 3) | | | |
| LGALS3BP | NM_005567 | Homo sapiens lectin, galactoside- | 102 | 331 | |
| | GI:6006016 | binding, soluble, 3 Bindeprotein | | | |
| LGALS4 | NM_006149 | Homo sapiens lectin, galactoside- | 103 | 332 | |
| | GI:6006017 | binding, soluble, 4 (Galectin 4) | | | |
| LGALS7 | NM_002307 | Homo sapiens lectin, galactoside- | 104 | 333 | 449 |
| | GI:4504984 | binding, soluble, 7 (Galectin 7) | | | |
| LGALS8 | NM_006499 | Homo sapiens lectin, galactoside- | 105 | 334 | |
| | GI:42544184 | binding, soluble, 8 (Galectin 8) | | | |
| LGALS9 | NM_002308 | Homo sapiens lectin, galactoside- | 106 | 335 | 450 |
| | GI:6806891 | binding, soluble, 9 (Galectin 9) | | | |
| LLGL2 | NM_004524 | Homo sapiens ‘lethal giant larvae’ | 107 | 336 | 451 |
| | GI:62739160 | homologue 2 (Drosophila), transcript | | | |
| | | variant 1 | | | |
| LYPLA2 | NM_007260 | Homo sapiens lysophospholipase II | 108 | 337 | |
| | GI:20302149 | | | | |
| MAPKAPK2 | NM_004759 | Homo sapiens mitogen-activated | 109 | 338 | |
| | GI:32481207 | protein kinase-activated protein | | | |
| | | kinase 2, transcript variant 1 | | | |
| MGAT1 | NM_002406 | Homo sapiens mannosyl (alpha-1,3-)- | 110 | 339 | |
| | GI:6031182 | glycoprotein beta-1,2-N- | | | |
| | | acetylglucosaminyltransferase | | | |
| MGAT3 | NM_002409 | Homo sapiens mannosyl (beta-1,4-)- | 111 | 340 | |
| | GI:19924166 | glycoprotein beta-1,4-N- | | | |
| | | acetylglucosaminyltransferase | | | |
| MGAT4A | NM_012214.2 | Homo sapiens mannosyl (alpha-1,3-)- | 166 | 341 | |
| | | glycoprotein beta-1,4-N- | | | |
| | | acetylglucosaminyltransferase, | | | |
| | | isozyme A, mRNA | | | |
| MGAT4B | NM_054013 | Homo sapiens mannosyl (alpha-1,3-)- | 112 | 342 | |
| | GI:83267864 | glycoprotein beta-1,4-N- | | | |
| | | acetylglucosaminyltransferase, | | | |
| | | isozyme B, transcript variant 2 | | | |
| MGAT5 | NM_002410 | Homo sapiens mannosyl (alpha-1,6-)- | 113 | 343 | 452 |
| | GI:6031185 | glycoprotein beta-1,6-N- | | | |
| | | acetylglucosaminyltransferase | | | |
| MGRN1 | NM_015246 | Homo sapiens Mahogunin, Ringfinger | 114 | 344 | |
| | GI:44917607 | 1 | | | |
| NAGK | NM_017567 | Homo sapiens N-acetylglucosamine- | 79 | 345 | |
| | GI:49574507 | kinase, mRNA. | | | |
| NANS | NM_018946 | Homo sapiens N-acetylneuramininic | 115 | 346 | |
| | GI:12056472 | acid synthase (sialic acid synthase) | | | |
| NDST1 | NM_001543 | Homo sapiens N-deacetylase/N- | 116 | 347 | 453 |
| | GI:46094001 | sulfotransferase (heparan | | | |
| | | glucosaminyl) 1 | | | |
| NEU1 | NM_000434 | Homo sapiens sialidase 1 (lysosomal | 117 | 348 | 454 |
| | GI:40806202 | sialidase) | | | |
| NEU2 | NM_005383 | Homo sapiens sialidase 2 (cytosolic | 118 | 349 | |
| | GI:4885514 | sialidase) | | | |
| NEU3 | NM_006656 | Homo sapiens sialidase 3 (membrane | 119 | 350 | |
| | GI:21704286 | sialidase) | | | |
| NEU4 | NM_080741 | Homo sapiens sialidase 4 | 171 | 351 | |
| NPL | NM_030769 | Homo sapiens N-acetylneuraminate- | 78 | 352 | |
| | GI:13540532 | pyruvate lyase (dihydrodipicolinate | | | |
| | | synthase) | | | |
| O-acetyl- | AF300796.1 | Homo sapiens sialic acid specific | 168 | 353 | |
| esterase | GI:10242344 | 9-O-acetylesterase I mRNA | | | |
| OGT | NM_181673.1 | Homo sapiens O-linked N- | 167 | 354 | |
| | | acetylglucosamin (GlcNAc) | | | |
| | | transferase (UDP-N- | | | |
| | | acetylglucosamine: polypeptide-N- | | | |
| | | acetylglucosaminyl transferase), | | | |
| | | transcript variant 2, mRNA | | | |
| PGM3 | NM_015599 | Homo sapiens phosphoglucomutase | 80 | 355 | |
| | GI:7661567 | 3 | | | |
| POFUT1 | NM_015352 | Homo sapiens protein O- | 176 | 356 | |
| | | fucosyltransferase 1 | | | |
| POFUT2 | NM_015227 | Homo sapiens protein O- | 177 | 357 | |
| | | fucosyltransferase 2 | | | |
| POMGNT1 | NM_017739 | Homo sapiens O-linked | 82 | 358 | |
| (FLJ20277) | GI:116686123 | mannose beta 1,2-N- | | | |
| | | acetylglucosaminyltransferase | | | |
| PPIA | NM_021130 | Homo sapiens peptidylprolyl- | 120 | 359 | 455 |
| | GI:45439309 | isomerase A (cyclophilin A), transcript | | | |
| | | variant 1 | | | |
| RABGAP1L | NM_014857 | Homo sapiens RAB GTPase | 121 | 360 | |
| | GI:78217385 | activating protein 1-like, transcript | | | |
| | | variant 1 | | | |
| RENBP | NM_002910.4 | Homo sapiens renin binding protein | 81 | 361 | |
| | GI:11496987 | | | | |
| RERE | NM_012102 | Homo sapiens arginine-glutamic acid | 122 | 362 | |
| | GI:19923392 | dipeptide (RE) repeats | | | |
| RNASE4 | NM_002937 | Homo sapiens ribonuclease, RNase | 123 | 363 | |
| | GI:37577173 | A family, 4, transcript variant 2 | | | |
| RPL13A | NM_012423 | Homo sapiens ribosomal protein L13a | 124 | 364 | |
| | GI:14591905 | | | | |
| SELE | NM_000450 | Homo sapiens selectin E (endothelial | 125 | 365 | 456 |
| | GI:4506870 | adhesion molecule 1) | | | |
| SELL | NM_000655 | Homo sapiens selectin L (lymphocytic | 126 | 366 | 457 |
| | GI:5713320 | adhesion molecule 1) | | | |
| SELP | NM_003005 | Homo sapiens selectin P (granule | 127 | 367 | |
| | GI:6031196 | membrane protein 140 kDa, antigen | | | |
| | | CD62) | | | |
| SIAE/ | NM_170601 | Homo sapiens sialic acid | 465 | 369 | |
| OAE | | acetylesterase | | | |
| SIGLEC1/ | NM_023068 | Homo sapiens sialic acid-binding Ig- | 170 | 370 | |
| CD169 | | like lectin 1, sialoadhesin | | | |
| SIGLEC10 | NM_033130 | Homo sapiens sialic acid-binding Ig- | 129 | 371 | |
| | GI:31377638 | like lectin 10 | | | |
| SIGLEC11 | NM_052884 | Homo sapiens sialic acid-binding Ig- | 130 | 372 | |
| | GI:16418392 | like lectin 11 | | | |
| SIGLEC12 | NM_053003 | Homo sapiens sialic acid-binding Ig- | 131 | 373 | |
| | GI:24497436 | like lectin 12, transcript variant 1 | | | |
| SIGLEC2/ | NM_001771 | Homo sapiens CD22 molecule | 34 | 374 | 458 |
| CD22 | GI:4502650 | | | | |
| SIGLEC3/ | NM_001772 | Homo sapiens CD33 molecule | 35 | 375 | 459 |
| CD33 | GI:50726999 | | | | |
| SIGLEC5 | NM_003830 | Homo sapiens sialic acid-binding Ig- | 132 | 376 | |
| | GI:4502658 | like lectin 5 | | | |
| SIGLEC6 | NM_198845 | Homo sapiens sialic acid-binding Ig- | 133 | 377 | |
| | GI:87298829 | like lectin 6, transcript variante 2 | | | |
| SIGLEC7 | NM_016543 | Homo sapiens sialic acid -binding Ig- | 134 | 378 | |
| | GI:7706570 | like lectin 7, transcript variant 2 | | | |
| SIGLEC8 | NM_014442 | Homo sapiens sialic acid -binding Ig- | 135 | 379 | |
| | GI:7657571 | like lectin 8 | | | |
| SIGLEC9 | NM_014441 | Homo sapiens sialic acid -binding Ig- | 136 | 380 | |
| | GI:23943855 | like lectin 9 | | | |
| SLC2A1 | NM_006516 | Homo sapiens ‘solute carrier’ family | 137 | 381 | |
| | GI:5730050 | 2 (facilitated glucose transporter), 1 | | | |
| SLC35A1 | NM_006416 | Homo sapiens ‘solute carrier’ family | 138 | 382 | |
| | GI:20149579\| | 35 (CMP- sialic acid transporter), A1 | | | |
| SLC35A2 | NM_005660 | Homo sapiens ‘solute carrier’ family | 139 | 383 | |
| | GI:5032210 | 35 (UDP-galactose transporter), A2, | | | |
| | | transcript variante 1 | | | |
| SLC35A3 | NM_012243 | Homo sapiens ‘solute carrier’ family | 140 | 384 | |
| | GI:6912667 | 35 (UDP-N-acetylglucosamine (UDP- | | | |
| | | GlcNAc) transporter), A3 | | | |
| SLC35D1 | NM_015139 | Homo sapiens ‘solute carrier’ family | 141 | 385 | |
| | GI:14028874 | 35 (UDP-glucuronic acid/UDP-N- | | | |
| | | acetylgalactosamine dual | | | |
| | | transporter), D1 | | | |
| ST3GAL1 | NM_003033 | Homo sapiens ST3 beta-galactoside | 142 | 386 | |
| | GI:27765097 | alpha-2,3-sialyltransferase 1, | | | |
| | | transcript variant 1 | | | |
| ST3GAL2 | NM_006927 | Homo sapiens ST3 beta-galactoside | 143 | 387 | |
| | GI:27765098 | alpha-2,3-sialyltransferase 2 | | | |
| ST3GAL3 | NM_006279 | Homo sapiens ST3 beta-galactoside | 144 | 388 | |
| | GI:28373066 | alpha-2,3-sialyltransferase 3, | | | |
| | | transcript variant 10 | | | |
| ST3GAL4 | NM_006278 | Homo sapiens ST3 beta-galactoside | 145 | 389 | 460 |
| | GI:5454057 | alpha-2,3-sialyltransferase 4 | | | |
| ST3GAL5 | NM_003896 | Homo sapiens ST3 beta-galactoside | 146 | 390 | |
| | GI:28373079 | alpha-2,3-sialyltransferase 5 | | | |
| ST3GAL6 | NM_006100 | Homo sapiens ST3 beta-galactoside | 147 | 391 | |
| | GI:31377787 | alpha-2,3-sialyltransferase 6 | | | |
| ST6GAL1 | NM_003032 | Homo sapiens ST6 beta-galactosamide | 148 | 392 | |
| | GI:27765094 | alpha-2,6-sialyltranferase 1, | | | |
| | | transcript variant 2 | | | |
| ST6GAL2 | NM_032528 | Homo sapiens ST6 Beta-Galactosamid | 149 | 393 | |
| | GI:26190609 | Alpha-2,6-Sialyltranferase 2 | | | |
| ST6GALNAC1 | NM_018414 | Homo sapiens ST6 (alpha-N-acetyl- | 150 | 394 | |
| | GI:90403587 | neuraminyl-2,3-beta-galactosyl-1,3)- | | | |
| | | N-acetylgalactosaminide alpha-2,6- | | | |
| | | sialyltransferase 1 | | | |
| ST6GALNAC2 | NM_006456 | Homo sapiens ST6 (alpha-N-acetyl- | 151 | 395 | 461 |
| | GI:5454091 | neuraminyl-2,3-beta-galactosyl-1,3)- | | | |
| | | N-acetylgalactosaminide alpha-2,6- | | | |
| | | sialyltransferase 2 | | | |
| ST6GALNAC3 | NM_152996 | Homo sapiens ST6 (alpha-N-acetyl- | 152 | 396 | |
| | GI:23308723 | neuraminyl-2,3-beta-galactosyl-1,3)- | | | |
| | | N-acetylgalactosaminid alpha-2,6- | | | |
| | | sialyltransferase 3 | | | |
| ST6GALNAC5 | NM_030965 | Homo sapiens ST6 (alpha-N-acetyl- | 153 | 398 | |
| | GI:13569937 | neuraminyl-2,3-beta-galactosyl-1,3)- | | | |
| | | N-acetylgalactosaminid alpha-2,6- | | | |
| | | sialyltransferase 5 | | | |
| ST6GALNAC6 | NM_013443 | Homo sapiens ST6 (alpha-N-acetyl- | 154 | 399 | |
| | GI:34147672 | neuraminyl-2,3-beta-galactosyl-1,3)- | | | |
| | | N-acetylgalactosaminid alpha-2,6- | | | |
| | | sialyltransferase 6 | | | |
| ST8SIA1 | NM_003034 | Homo sapiens ST8 alpha-N-acetyl- | 155 | 400 | |
| | GI:28373095 | neuraminide alpha-2,8- | | | |
| | | sialyltransferase 1 | | | |
| ST8SIA2 | NM_006011 | Homo sapiens ST8 alpha-N-acetyl- | 156 | 401 | |
| | GI:59806358 | neuraminid alpha-2,8- | | | |
| | | sialyltransferase 2 | | | |
| ST8SIA3 | NM_015879 | Homo sapiens ST8 alpha-N-acetyl | 157 | 402 | |
| | GI:7705667 | neuraminide alpha-2,8- | | | |
| | | sialyltransferase 3 | | | |
| ST8SIA4 | NM_005668 | Homo sapiens ST8 alpha-N-acetyl- | 158 | 403 | |
| | GI:38202228 | neuraminide alpha-2,8- | | | |
| | | sialyltransferase 4, | | | |
| | | transcript variant 1 | | | |
| ST8SIA5 | NM_013305 | Homo sapiens ST8, alpha-N-acetyl- | 159 | 404 | |
| | GI:59806359 | neuraminide alpha-2,8- | | | |
| | | sialyltransferase 5 | | | |
| ST8SIA6 | NM_001004470 | Homo sapiens ST8 alpha-N-acetyl- | 160 | 405 | |
| | | neuraminide alpha-2,8- | | | |
| | | sialyltransferase 6 | | | |
| SULT1C2 | NM_001056 | Homo sapiens sulfotransferase | 203 | 406 | 462 |
| | GI:45935387 | family, cytosolic, 1C, family member | | | |
| | | 1, transcript variant 1 | | | |
| SULT1C4 | NM_006588 | Homo sapiens sulfotransferase | 201 | 407 | |
| | GI:28830307 | family, cytosolic, 1C, family member | | | |
| | | 2 | | | |
| TACSTD1 | NM_002354 | Homo sapiens tumour-associated | 163 | 408 | |
| | GI:4505058 | calcium signal transducer 1 | | | |
| TAF15 | NM_003487 | Homo sapiens TAF15 RNA | 164 | 409 | |
| | GI:21327699 | polymerase II, TATA box binding | | | |
| | | protein (TBP)-associated factor, | | | |
| | | 68 kDa, transcript variant 2 | | | |
| TAX1BP1 | NM_006024 | Homo sapiens Tax1 (human T-cell | 165 | 410 | |
| | GI:21361681 | leukaemia virus type I) binding protein | | | |
| | | 1 | | | |
| TNFRSF1B | NM_001066 | Homo sapiens tumour necrosis factor | 162 | 411 | 463 |
| | GI:23312365 | receptor superfamily, 1B | | | |
| TUBA3C | NM_006001 | Homo sapiens tubulin, alpha 2, | 204 | 412 | 464 |
| | GI:17921992 | transcript variant 1 | | | |
| TUBA4 | NR 003063 | Homo sapiens tubulin, alpha 4 | 200 | 200 | 413 |
| | GI:95113641 | | | | |
| UAP1 | NM_003115 | Homo sapiens UDP-N- | 161 | 161 | 414 |
| | GI:34147515 | acteylglucosamine | | | |
| | | pyrophosphorylase 1 | | | |
| WBSCR1/ | NM_022170 | Homo sapiens Williams-Beuren | 190 | | 415 |
| EIF4H | GI:11559922 | syndrome chromosome region 1, | | | |
| | | transcript variant 1 | | | |
| WBSCR17/ | NM_022479 | Homo sapiens Williams-Beuren | 174 | 174 | 416 |
| GALNTL3 | | syndrome chromosome region 17 | | | |
| | | (WBSCR17) | | | |

In column four of the Table, the corresponding SEQ ID numbers are assigned to the genes described. Furthermore, in column five (SEQ ID NO Oligo 1) and six (SEQ ID NO Oligo 2), the corresponding SEQ ID numbers of preferred oligonucleotides are assigned to the genes in question.

[0061] In a further preferred embodiment of the support of the invention, the probes are selected from the preferred oligonucleotides listed in Table 1.

[0062] In a further preferred embodiment each of the proteins of Table 1 is represented by at least one probe on the support.

[0063] The invention further relates to a kit, comprising the set of probes as defined above. In a preferred embodiment, the kit according to the invention comprises at least one probe each for the proteins mentioned in Table 1. The probes contained in the kit can be used for the production of a support, for example of the support according to the invention, and also as probes in hybridisation methods such as e.g. Southern Blotting or Northern Blotting. These methods per se are well-known in the art.

[0064] The present invention also relates to the use of the support or kit according to the invention for the quantitative determination of the expression of nucleic acids encoding fucosyltransferases, galactosyltransferases, N-acetylglucosaminyl transferases, N-acetylgalactosaminyl transferases, sialyltransferases, sugar sulfotransferases, lectins, selectins, fucosidases, neuraminidases (sialidases), nucleotide sugar epimerases, sugar kinases, sugar epimerases, sugar transporters and enzymes of the fucose or sialic acid metabolism, in a sample obtained from a cell, a tissue or an organism.

[0065] In accordance with the present invention, the term quantitative determination refers to the measuring of the amount of a target molecule or a value proportional thereto. This amount can be stated as an absolute value (e.g. the signal intensity of the target molecule) or as a ratio. The presentation of the quantity in form of a ratio, e.g. between the signal intensities of the target molecule and a control molecule analysed in parallel offers crucial advantages. For example, experiments can be compared with each other that were carried out at different times, under different conditions, with different methods or different starting material. Methods for the analysis and determination of expression data are known to the person skilled in the art.

[0066] In accordance with the present invention, the term a sample obtained from a cell, a tissue or an organism refers to a sample which is obtained from cells, tissues or an organism by means of, for example, methods known in the art. For example, a sample can be taken from a living organism by means of biopsy. In addition, methods such as e.g. laser capture microdissection can be used to isolate individual cells. These methods per se are well-known in the art, as described e.g. in Kamme et al., 2003. Subsequently, the thus obtained cells and/or tissues as well as cells from cell cultures can be lysed by methods known to the person skilled in the art. By means of these methods, samples can be obtained, for example, from a single cell. However, samples can also be obtained from a greater number of cells, for example 10³ to 10⁵ cells.

[0067] Furthermore, the invention relates to a method for the quantitative determination of the expression of nucleic acids encoding fucosyltransferases, galactosyltransferases, N-acetylglucosaminyl transferases, N-acetylgalactosaminyl transferases, sialyltransferases, sugar sulfotransferases, lectins, selectins, fucosidases, neuraminidases (sialidases), nucleotide sugar epimerases, sugar kinases, sugar epimerases, sugar transporters and enzymes of the fucose or sialinic acid metabolism, comprising the steps of contacting the support according to the invention with a preparation of labelled nucleic acids obtained by reverse transcription of mRNAs that are present in a sample obtained from a cell, a tissue or an organism, and quantifying the amount of labelling bound to the probes on the support.

[0068] In this context, labelled nucleic acids include, among others, cDNAs or cRNAs which have a detectable label, for example a radioactive or a luminescent or fluorescent label, or which are biotinylated. The production of labelled cDNAs is well-known to the person skilled in the art and is described, for example, in Manduchi et al., 2002. For example labelled nucleotides can be introduced directly into the resulting cDNA during the reverse transcription of RNA, or specific reactive nucleotides are introduced which, in a second step, are linked to a label (e.g. indirect amino allyl cDNA labelling), or cDNAs can be equipped with a so-called “capture sequence” which facilitates labelling of the cDNAs already bound to the array by means of fluorescent dendrimers (e.g. Genisphere 3DNA Array labelling kits). The production of labelled cRNAs is also well-known to the person skilled in the art. For example, mRNA is used as a template for cDNA synthesis which, after purification, is transcribed into cRNA in an in vitro transcription with labelled ribonucleotides. Frequently used labels include, for example, the fluorescent labels Cy3, Cy5, Alexa Fluor 546 or Alexa Fluor 647, as well as P³²-labelled nucleotides for direct labelling in the case of radioactive labelling. In this context, different samples can be labelled with different labels (e.g. different fluorescent markers) and, subsequently be contacted with a common support (dual colour labelling) or the same label (for example biotin) can be used for all samples, in which case each sample is contacted with a separate support (single colour labelling).

[0069] A preferred embodiment of the method according to the invention further comprises the determination of the expression of nucleic acids encoding fucosyltransferases, galactosyltransferases, N-acetylglucosaminyl transferases, N-acetylgalactosaminyl transferases, sialyltransferases, sugar sulfotransferases, lectins, selectins, fucosidases, neuraminidases (sialidases), nucleotide sugar epimerases, sugar kinases, sugar epimerases, sugar transporters and enzymes of the fucose or sialinic acid metabolism, wherein the determination of the expression comprises: (i) determination of the amount of mRNA by PCR, Ribonuclease Protection Assay or SAGE (Serial Analysis of Gene Expression); and/or (ii) determination of the amount of protein.

[0070] Thus, in accordance with this preferred embodiment, the determination of the expression by means of the support or kit according to the invention is enriched by further expression data which are determined by means of other methods.

[0071] Methods for the determination of the amount of mRNA by PCR as such are well-known to the person skilled in the art and include, for example, real-time PCR and real competitive PCR. Methods for the determination of the amount of mRNA by Ribonuclease Protection Assay or SAGE as such are well-known in the art and are described, for example, in Ding and Cantor, 2004.

[0072] In a further preferred embodiment of the method according to the invention, the determination of the expression of the fucosyltransferases, galactosyltransferases, N-acetylglucosaminyl transferases, N-acetylgalactosaminyl transferases, sialyltransferases, sugar sulfotransferases, lectins, selectins, fucosidases, neuraminidases, sialidases, nucleotide sugar epimerases, sugar kinases, sugar epimerases, sugar transporters and enzymes of the fucose or sialinic acid metabolism takes place by means of antibodies or aptamers that are specific for the fucosyltransferases, galactosyltransferases, N-acetylglucosaminyl transferases, N-acetylgalactosaminyl transferases, sialyltransferases, sugar sulfotransferases, lectins, selectins, fucosidases, neuraminidases, sialidases, nucleotide sugar epimerases, sugar kinases, sugar epimerases, sugar transporters and enzymes of the fucose or sialinic acid metabolism.

[0073] The term “antibody” in accordance with the invention comprises specific antibodies or antibody fragments or antibody derivatives. Fragments of antibodies include e.g. Fab or F(ab′)₂ fragments. Derivatives include scFvs. Methods for the generation of specific antibodies are known in the art. Standard detection methods wherein antibodies are used are, as already mentioned above, among others ELISA, RIA or also protein arrays, but also immunofluorescence, flow cytometry and other detection methods. In this context, the antibodies bind specifically to the target molecules. The antibody binding can be made visible by e.g. labelling of the primary antibodies or is detected by means of secondary antibodies that bind the antibody, and that are in this case labelled themselves. The antibodies can be modified with e.g. fluorescent substances, radioactive labelling or an enzymatic label. Immunological detection methods using specific antibodies are known in the art (e.g. Harlow et al., 1988) and include, for example, Western Blotting, ELISA, RIA, protein arrays, immunofluorescence or flow cytometry. Suitable antibodies according to the invention are, for example but not exclusively, CD22 antibodies, antibodies against Thomsen-Friedenreich glycotope as well as antibodies for sialyl Lewis X and sialyl Lewis A antigens.

[0074] The term “aptamer” according to the invention comprises nucleic acids that, due to their three-dimensional structure, bind to a target molecule. Aptamers per se are known in the art, e.g. in Osborne et al., 1997.

[0075] In a preferred embodiment of the use according to the invention or the method according to the invention, the expression shows the glycosylation status of the cell, the tissue or the organism.

[0076] Glycosylation status refers to the number and kind of sugar side chains of proteins on/in a cell. The knowledge about the condition of the glycosylation apparatus, which is gained by means of the expression analysis, enables a correlation with the glycosylation status of a cell. For example, the knowledge about a reduced expression of the enzyme UDP-N-acetylglucosamine-2-epimerase/N-acetylmannosamine-kinase (GNE)—the key enzyme of sialic acid synthesis—enables a correlation to the density of sialic acid on the cell surface.

[0077] The use of the expression data according to the invention for the analysis of the glycosylation status can be used, for example, for the profiling of cell lines for the production of glycosylated biopharmaceuticals. By means of the array, the selection of the optimum cell line for the biosynthesis of a desired glycan structure is facilitated. Furthermore, it can be tested whether enzymes are expressed which can reduce or prevent the synthesis of a desired glycan structure.

[0078] The analysis of expression patterns according to the invention is also advantageous with regard to testing of the effects of glycoengineering. Often, cell lines have to be subjected to additional glycoengineering either to enhance specific glycosyl transferase activities and/or to reduce or eliminate other activities e.g. by means of siRNA technology. The success of this glycoengineering and the potential additional changes of the expression profile associated therewith can be analysed by means of the method according to the invention.

[0079] The effect of changes in cell culture parameters such as e.g. serum deprivation or changes in the O₂ and/or CO₂ gas concentration can be observed since they have an important impact on the glycolisation pattern of product cell lines. Additionally or alternatively, the expression patterns can also serve for the process monitoring of the constancy of cell cultivation processes during the production phase.

[0080] In a further preferred embodiment of the use according to the invention or the method according to the invention, the expression indicates the disease state, the malignancy and/or the potential of formation of metastase of the cell, the tissue or the organism.

[0081] The term malignancy according to the invention describes a course of disease which has a progressive destructive effect and, potentiallly, can lead to death. In connection with tumour diseases, malignancy relates to the capability of a tumour to penetrate the basal membrane and form metastases. A tumour of that kind is colloquially referred to as cancer. Depending on the capability of tumours/tumour cells to develop such metastases, a differentiation is made between low malignant and highly malignant tumours.

[0082] The term potential of formation of metastase refers to the capability of cells (in general tumour cells) to lose connectivity to the surrounding tissue. During this loss of connectivity, groups of cells can detach and emigrate. An additional defect of the adhesion molecules on the surface of (malignant) cells that are essential for the connectivity of cells facilitates the emigration additionally.

[0083] By means of the use according to the invention or the method according to the invention, for example expression profiles of carcinomas with different prognoses can be obtained and the expression data can be correlated with categories such as the metastasis of the carcinoma and the survival period of the patient, so that a prognoses can be given for other patients. Thus, array-based profiling of tumour-expressed glycosylation enzymes represents an innovative technology for diagnostics or therapy prognoses.

[0084] For all these uses and methods, the present invention offers highly parallel and quickly to perform alternatives to the elaborate glycan analyses.

[0085] The invention further relates to a diagnostic composition comprising the set of probes as defined above.

[0086] The invention further relates to the use of the set of probes according to the invention for the preparation of one or more diagnostic compositions or of a diagnostic device for the diagnosis of tumours, inflammatory and/or neurological diseases.

[0087] The measurement of the activity of enzymes, the activity of which regulates the glycosylation in a tissue- and differentiation-specific way, can be used for diagnostic purposes. In addition, also the mRNA expression of these glycogens can be of diagnostic value. For example, it is known that specific acidic sugars (sialic acids) occur more strongly in the glycan structures of metastasising tumour cells. In accordance with this, also the expression of the enzyme catalysing the formation of these structures (sialyltransferase ST6Gal-1) is increased in metastasising colorectal carcinomas (Dall'Olio et al., 1989; Kemmner et al., 1994). Similar results were found in analyses of stomach, kidney, prostate and mamma carcinomas (see Table 2).

[0088] The immune defence also depends on a regulated activation of glycosyltransferases. Investigations show that the expression profile of different glycosyltransferases changes during the development of T-lymphocytes in a temporally and spacially controlled manner (Baum, 2002). For example, the sugar sequence NeuAca2,6Gal, the product of the ST6Gal-I sialyltransferase, is only found on mature medullary thymocytes. Moreover, glycosylation also plays an important role for the activation of the HIV virus (Lefebvre et al., 1994) or the infection of epithelia cells by influenza viruses (Stevens et al., 2006).

[0089] Another highly glycosylated protein is the prion protein which is made responsible for spongiform encephalopathies, such as bovine spongiform encephalopathy (BSE) in cattle and Creutzfeld-Jakob disease in humans. Glycosylation is one of the factors controlling the conversion of the “normal” protein into the disease-causing form and depends on the relative activities of the glycosyltransferases of the host cell.

[0090] Moreover, changes of the expression pattern of glycogens were detected in Alzheimer's disease, neuromuscular and hereditary diseases (CGD), which e.g. lead to mental retardation.

[0091] Table 2 summarises important studies which show how the expression patterns of these glycogens differ in different clinical pictures.

[0092] As already defined above, the term tumour according to the invention refers to new formation of body tissues (neoplasia) occurring due to a dysregulation of cell growth. Differentiation is made between benign and malignant tumours.

[0093] As already defined above, inflammatory diseases according to the invention are diseases which represent a first reaction of the immune system to infections or stimuli such as e.g. physical stimuli, microorganisms, allergens, toxins or dysfunctional enzymes, which have-the function to remove or to repair the damaging stimulus. Frequently occurring diseases include e.g. arthritis, myocarditis, dermatitis, otitis, pneumonia, rheumatoid diseases, Crohn's disease, ulcerative colitis, spondylitis, osteoarthritis or psoriasis.

[0094] As already defined above, neurological diseases according to the invention refer to diseases of the nervous system. The organ systems concerned are the central nervous system and the peripheral nervous system including the surrounding structures. Neurological diseases include e.g. multiple sclerosis, cerebral meningitis, inflammations of the spinal cord, cerebral infarct, Parkinson's disease, brain tumours, migrane, epilepsy, dementias and muscle dystrophies.

TABLE 2
Expression patterns of glyogens in different clinical pictures.

| Disease | Publication |
|---|---|
| Alzheimer's | B. Espinosa et al.; 2001; J. Neuropathol. Exp. Neurol. |
| disease | 60(5): 441. |
| | Y. Huang et al.; 2004; Eur. J. Neurosci. 20(12): 3489. |
| | L. A. Robertson et al.; 2004; J. Alzheimers. Dis. |
| | 6(5): 489. |
| Cancer | F. Schneider et al.; 2001; Cancer Res. 61(11): 4605. |
| diseases | E. Y. Song et al.; 2001; Cancer Invest 19(8): 799. |
| | T. Petretti et al.; 2000; Gut 46(3): 359. |
| | T. Takahashi et al.; 2000; Int. J. Cancer 88(6): 914. |
| | I. Brockhausen; 1999; Biochim. Biophys. Acta |
| | 1473(1): 67. |
| | J. Burchell et al.; 1999; Glycobiology. 9(12): 1307. |
| | J. W. Dennis et al.; 1999; Biochim. Biophys. Acta |
| | 1473(1): 21. |
| | T. F. Orntoft and E. M. Vestergaard; 1999; |
| | Electrophoresis 20(2): 362. |
| | T. Petretti et al.; 1999; Biochim. Biophys. Acta |
| | 1428(2-3): 209. |
| | T. Kudo et al.; 1998; Lab. Invest. 78(7): 797. |
| | H. Ito et al.; 1997; Int. J. Cancer 71(4): 556. |
| | G. Sotiropoulou et al.; 2002; Mol. Med. 8(1): 42. |
| | S. Saito et al.; 2002; Oncol. Rep. 9(6): 1251. |
| | Y. Ide et al.; 2006; Biochem. Biophys. Res. Commun. |
| | 341(2): 478. |
| | X. L. Jin et al.; 2004; Hepatobiliary. Pancreat. |
| | Dis. Int. 3(2): 292. |
| Hereditary | J. Jaeken and G. Matthijs; 2001; Annu. Rev. Genomics |
| diseases | Hum. Genet. 2: 129. |
| | B. S. Miller and H. H. Freeze; 2003; Rev. Endocr. |
| | Metab Disord. 4(1): 103. |
| | E. A. Eklund and H. H. Freeze; 2006; NeuroRx. |
| | 3(2): 254. |
| | L. Sturla et al.; 2005; Glycobiology 15(10): 924. |
| | E. Martin-Rendon and D. J. Blake; 2003; Trends |
| | Pharmacol. Sci. 24(4): 178. |
| Diseases of the | J. B. Lowe; 2001; Cell 104(6): 809. |
| immune system | G. Alvarez et al.; 1999; Immunol. Invest. 28(1): 9. |
| | J. S. Axford; 1999; Biochim. Biophys. Acta |
| | 1455(2-3): 219. |
| | P. J. Delves; 1998; Autoimmunity 27(4): 239. |
| | L. Galli Stampino et al.; 1997; Cancer Res. |
| | 57(15): 3214. |
| | A. Orlacchio et al.; 1997; J. Neurol. Sci. |
| | 151(2): 177. |
| | J. C. Lefebvre et al.; 1994; Virology 199: 265. |
| | T. Feizi and M. Larkin; 1990; Glycobiology |
| | 1(1): 17. |
| | [Erratum in Glycobiology 1991 June; 1(3): 315]. |
| | M. Demetriou et al.; 2001; Nature 409(6821): 733. |
| | M. Bunting et al.; 2002; Curr. Opin. Hematol. |
| | 9(1): 30. |
| | E. I. Buzas et al.; 2006; Autoimmunity 39(8): 691. |
| | M. Lanteri et al.; 2003; Glycobiology 13(12): 909. |
| Muscle | A. Yoshida et al.; 2001; Dev. Cell 1(5): 717. |
| dystrophies | B. Xia et al.; 2002; Dev. Biol. 242(1): 58. |
| | T. Endo and H. Manya; 2006; 417: 137. |
| Neurological | H. Narimatsu; 2006; CNS. Neurol. Disord. Drug Targets. |
| diseases | 5(4): 441. |
| Prion-mediated | P. M. Rudd et al.; 2002; Curr. Opin. Struct. Biol. |
| diseases | 12(5): 578. |
| | C. J. Bosques and B. Imperiali; 2003; |
| | Proc. Natl. Acad. Sci. U.S.A. 100(13): 7593. |
| | M. Ermonval et al.; 2003; Biochimie 85(1-2): 33. |
| Influenza | J. Stevens et al.; 2006; J. Mol. Biol. 355(5): 1143. |
| diseases | K. F. Winklhofer et al.; 2003; Traffic. 4(5): 313. |
| (Influenza) | M. Matrosovich et al.; 2003; J. Virol. 77(15): 8418. |
| | S. J. Morris et al.; 1999; J. Gen. Virol. 80(Pt 1): 137. |

[0095] In a preferred embodiment of the method according to the invention, the tumour is selected from the group consisting of colorectal carcinoma, stomach carcinoma, mamma carcinoma, pancreatic carcinoma, melanoma, sarcoma and lymphomas, such as e.g. Hodgkin lymphoma and non-Hodgkin lympoma.

[0096] The Figures show:

[0097] FIG. 1:

[0098] Hybridisation of the support of the invention with cDNA samples. On the left, the complete array with four fields is shown. On the right, one of the subarrays is shown magnified. cDNAs were labelled using the Invitrogen direct kit.

[0099] FIG. 2:

[0100] Immuno-histochemical stainings of pancreatic carcinoma cells with an antibody specific for glycoprotein CD22. p-16 transfectants correspond to p16 transfected capan cells; mock transfectants correspond to capan cells that were transfected with the same vector having antibiotic resistance, but without target sequence; RAJI cells serve as positive control. Red indicates the fluorescence of the CD22-specific antibody. Cell nuclei are marked blue (DAPI staining).

[0101] FIG. 3:

[0102] Determination of membrane-bound sialic acid on the surface of pancreatic carcinoma cells. p16 are p16-transfected capan cells; mock refers to capan cells transfected with a vector having antibiotic resistance but without target gene sequence.

[0103] The Examples illustrate the invention. The examples are not intended to limit the invention. The examples are only added to illustrate the invention and the invention is exclusively defined by the claims.

### EXAMPLE 1

[0104] Sample Preparation and Array Hybridisation

[0105] Total RNA is extracted by means of RNeasy and the quality and quantity of the RNA obtained is examined using BioAnalyzer (Agilent). Subsequently, the RNA is labelled by reverse transcription with fluorescent dyes. Different processes for labelling the cDNA samples were carried out according to the manufacturer's instructions and tested (see Table 2). A total of 7 different labelling methods using different dyes, such as Alexa 647/546 or Cy3/Cy5 as well as different reverse transcriptases were used. As a comparison, the long-established direct/indirect methods by Amersham using Cy3/Cy5 dyes and a direct method kit by Invitrogen, were tested. The latter method showed the best results with respect to signal intensity.

TABLE 2
Tests of different cDNA labelling methods

| Method | Result |
|---|---|
| Amersham direct Cy3/Cy5 | weak signals, not satisfactory |
| 3DNA Array 350 Cy3/Cy5 | signals not satisfactory |
| Amersham indirect Cy3/Cy5 | signals not sufficiently reproducible |
| 3DNA Array 900 Alexa 647/546 | not suitable |
| 3DNA Array 350 Alexa 546/647, | clear red, yellow and green signals |
| Powerscript II | |
| 3DNA Array 350 Alexa 546/647, | clear red, yellow and green signals |
| Superscript II | |
| Invitrogen direct, Alexa 546/647 | clear red, yellow and green signals |

[0106] The quality of the labelling is then examined by NanoDrop Measuring and the labelled cDNA is hybridised in the aHyb station (Miltenyi) onto the array. Fluorescence is measured by means of the AGILENT scanner and the data are evaluated using AGILENT software.

### EXAMPLE 2

[0107] Comparison of Expression Patterns of Selected Target Molecules using GlycoProfiler Array and Real Time PCR in Transfected Capan-1 Prancreatic Carcinoma Cells.

[0108] The pancreatic cell line CAPAN-1, which was transfected with the tumour suppressor gene p16 (p16) as well as a mock-transfected control cell line (CAPAN-1 transfected with the same vector having antibiotic resistance genes but no target gene sequence) were characterised by the GlycoProfiler Array.

[0109] The tumour suppressor p16 is an inhibitor of cyclin-dependant kinases (cdk4+6), Which play an important role in the control of the cell cycle by phosphorylating the product of the retinoblastoma (pRb). In the normal cell cycle, the expression of p16 is strictly controlled. The Microarray experiments show significant differences in the gene expression of glycosylation genes between the p16 cell line and the mock-transfected cell line. This confirms that glycosylation and glycosylation-dependant functions, such as lectin binding or induction of anoikis, are dramatically altered by the transfection with p16.

[0110] In addition, the hybridisation results of the Microarray were verified by quantitative real time RT-PCR (Taqman). The PCR results are used as “gold standard” to evaluate the specificity of the microarray results. For this purpose, a library of PCR primers was established for 17 of the most important target molecules of the GlycoProfiler Array. As shown in Table 3, the results of the microarray examination are in close agreement with those of the real time PCR. For example, for the enzyme UDP-N-Acetylglucosamine-2-epimerase/N-acetylmannosamine kinase (GNE), the PCR as well as the array data show very low expression of the enzyme in p16-transfected cells (Table 3). UDP-N-acetylglucosamine-2-epimerase/N-acetylmannosamine kinase is the key enzyme in the biosynthesis of sialic acids and regulates the first two steps of this metabolic pathway and, thus, plays a crucial role in its regulation. The two methods also correspond with regard to the expression of CMP-Neu/Ac synthetase (CMAS), another important “down-stream” situated enzyme of the sialic acid metabolism, which is highly increased in p16-transfected cells. As shown in the other examples (Table 3), the microarray allows satisfactory determination of the gene expression profile of the cells.

TABLE 3
Differences in the gene expression of selected
target molecules using GlycoProfiler Array (second
column) and real time PCR (first column).

| Gene | Taqman | GlycoProfiler |
|---|---|---|
| B3GNT3 | 0.09 | 0.14 |
| B3GNT5 | 4.98 | 1.93 |
| C2GNT-L | 0.33 | 0.18 |
| C2GNT-M | 0.09 | 0.10 |
| CD22 | 0.02 | 0.51 |
| CMAS | 3.00 | 2.30 |
| GNE | 0.01 | 0.04 |
| FUT6 | 0.20 | 0.91 |
| FUT8 | 0.21 | 0.31 |
| Gal-1 | 1.11 | 1.29 |
| Gal-3 | 0.64 | 0.48 |
| MGAT3 | 0.57 | 2.09 |
| MGAT5 | 0.37 | 0.72 |
| NANS | 0.57 | 0.93 |
| ST3Gal IV | 1.05 | 0.96 |
| ST6Gal I | 1.43 | 1.12 |
| ST6GalNAc II | 0.36 | 0.51 |

The expression values are shown as quotients of the expression (relative amount) of p16/mock.

### EXAMPLE 3

[0111] CD22 Expression in Transfectants of Capan-1 Pancreatic Carcinoma Cells.

[0112] Both the GlycoProfile Array as well as RT-PCR show that CD22, a sialic acid-binding lectin, is more strongly expressed in mock-transfected cells than in p16-transfected cells. As shown in FIG. 2, this reduced CD22 expression in p16-cells can also be confirmed by immuno histochemical analyses. The staining of mock-cells by a CD22-antibody is considerably more intense than the staining of p16-transfected cells (FIG. 2). Thus, in this case, it is possible to directly infer the presence of lectin protein CD22 from the CD22 expression of the mRNA.

### EXAMPLE 4

[0113] Membrane-Bound Amount of Sialic Acid on the Surface of Transfected Capan-1 Pancreatic Carcinoma Cells.

[0114] Analysis of the amount of membrane-bound sialic acid on the surface of p16-transfected and mock-transfected cells by means of a highly sensitive HPLC-based detection method (Hara et al. 1987) show that p16-transfected cells exhibit reduced sialic acid production and sialic acid density on glycoconjugates of the cell membrane (FIG. 3). The amount of sialic acid detected on the cell surface of p16-transfectants is significantly less than the amount detected on mock-transfectants (6.5 nmol sialic acid/mg protein compared to 12.4 nmol/mg).

[0115] In combination with the reduced expression of the enzyme GNE—the key enzyme of sialic acid synthesis—in p16-transfected cells as shown in Example 2, these results demonstrate that it is possible to infer, at least to a certain degree from the mRNA expression of GNE, the density of sialic acid on the cell surface.

### EXAMPLE 5

[0116] Glycoprofiling of Cell Lines Under Different Culture Conditions.

[0117] Glycoprofiling can be used to control temporal changes in the expression pattern of the glycosylation apparatus of cell lines subjected e.g. to modified culture conditions. The effect of the serum content as well as of temperature and gases is of particular relevance for the culture of production cell lines. It is therefore of interest to characterise the expression pattern of the glycosylation apparatus of cell lines under serum depletion or upon culture in serum-free media by means of the microarray technique.

[0118] Extraction of total RNA and labelling of cDNA, hybridisation with the array and data evaluation are carried out as described in Example 2.

### EXAMPLE 6

[0119] Glycoprofiling of Glyco-Engineered Production Cell Lines.

[0120] It is possible to glyco-engineer cell lines by transfecting glycosyltransferases or by silencing them using siRNA techniques. To analyse how such manipulations are reflected at the level of glycoprofiling and whether other elements which are different from those elements of the glycosylation machinery that have been changed potentially react to these manipulations, the GlycoProfiler Array may be used. It allows determining qualitative and quantitative changes of the different glycosyltransferases expressed in a cell line after a specific glycoengineering.

[0121] For this purpose, selected glycosyltransferases, such as sialyltransferase ST6Gal-1, are over-expressed in cell lines or are reduced or eliminated by siRNA and the expression pattern of the glycosylation apparatus of the cells is analysed. Extraction of total RNA as well as labelling of cDNA, hybridisation with the array and data evaluation are carried out as described in Example 2.

### EXAMPLE 7

[0122] Glycoprofiling of Human Tumour Tissues.

[0123] It is very difficult to quantitatively measure individual glycan structures on cells or in tissue due to their complexity and their presence in only small amounts. The above-mentioned examples, however, show that the expression profile of glycosyltransferases present in a cell can provide information about the glycan structures formed and, thus, may be of diagnostic interest.

[0124] 20 samples of colorectal carcinomas, gastric carcinomas and mamma carcinomas and of the related normal tissues, respectively, are analysed and their profiles compared with the results of real time PCR.

[0125] To this aim, tissues are cut using a cryostat and examined by an experimental pathologist. The selection and examination of the material to be analysed are particularly important for the subsequent analyses. Only biopsies which contain more than 60% carcinoma tissue, no lymph follicles, little connective tissue and only small amounts of fatty tissue and which show no symptoms of necrosis are further processed. The extraction of total RNA, labelling of cDNA, hybridisation with the array and data evaluation are carried out as described in Example 2.

[0126] In this way it is possible to gather expression profiles of carcinomas with different prognosis and to correlate the expression data with categories such as metastasis of the carcinoma and the survival time of the patients.

### Further Literature

[0127] Auburn R P, Kreil D P, Meadows L A, Fischer B, Matilla S S, Russell S. Robotic spotting of cDNA and oligonucleotide microarrays. Trends Biotechnol. July 2005; 23(7):374-9.

[0128] Ausubel, “Current Protocols in Molecular Biology”, Green Publishing Associates and Wiley Interscience, N.Y., 1989

[0129] Baum L G. Developing a taste for sweets. Immunity. January 2002; 16(1):5-8.

[0130] Castoldi M, Schmidt S, Benes V, Noerholm M, Kulozik A E, Hentze M W, Muckenthaler M U A sensitive array for microRNA expression profiling (miChip) based on locked nucleic acids (LNA). RNA. May 2006; 12(5):913-20.

[0131] Dall'Olio F, Malagolini N, di Stefano G, Minni F, Marrano D, Serfini-Cessi F. Increased CMP-NeuAc:Gal beta 1,4GlcNAc-R alpha 2,6 sialyltransferase activity in human colorectal cancer tissues. Int J Cancer. Sep. 15, 1989; 44(3):434-9.

[0132] Ding C, and Cantor C. R., Quantitative Analysis of Nucleic Acids—the Last Few Years of Progress. Journal of Biochemistry and Molecular Biology. 2004 37, 1-10.

[0133] Gao X, LeProust E, Zhang H, Srivannavit O, Gulari E, Yu P, Nishiguchi C, Xiang Q, Zhou X. A flexible light-directed DNA chip synthesis gated by deprotection using solution photogenerated acids. Nucleic Acids Res. Nov. 15, 2001; 29(22):4744-50.

[0134] Hara S, Takemori Y, Yamaguchi M, Nakamura M, Ohkura Y. Fluorometric high-performance liquid chromatography of N-acetyl- and N-glycolylneuraminic acids and its application to their microdetermination in human and animal sera, glycoproteins, and glycolipids. Anal Biochem. July 1987; 164(1):138-45.

[0135] Harlow et al., Antibodies: A Laboratory Manual, Cold Spring Harbor Laboratory Press, 1988

[0136] Harris and Winssinger, PNA encoding (PNA=peptide nucleic acid): from solution-based libraries to organized microarrays. Chemistry. Nov. 18, 2005; 11(23):6792-801.

[0137] Higgins and Hames (Eds.) “Nucleic acid hybridization, a practical approach” IRL Press Oxford, Washington D.C., 1985

[0138] Kamme F, Salunga R, Yu J, Tran D T, Zhu J, Luo L, Bittner A, Guo H Q, Miller N, Wan J, Erlander M. Single-cell microarray analysis in hippocampus CA1: demonstration and validation of cellular heterogeneity. J Neurosci. May 1, 2003; 23(9):3607-15.

[0139] Kemmner W, Kruck D, Schlag P., Different sialyltransferase activities in human colorectal carcinoma cells from surgical specimens detected by specific glycoprotein and glycolipid acceptors. Clin Exp Metastasis. May 1994; 12(3):245-54.

[0140] Lausted C, Dahl T, Warren C, King K, Smith K, Johnson M, Saleem R, Aitchison J, Hood L, Lasky S R. POSaM: a fast, flexible, open-source, inkjet oligonucleotide synthesizer and microarrayer. Genome Biol. 2004; 5(8):R58. Epub Jul. 27, 2004.

[0141] Lefebvre J C, Giordanengo V, Doglio A, Cagnon L, Breittmayer J P, Peyron J F, Lesimple J. Altered sialylation of CD45 in HIV-1-infected T lymphocytes. Virology. March 1994; 199(2):265-74.

[0142] Manduchi E, Scearce L M, Brestelli J E, Grant G R, Kaestner K H, Stoeckert C J Jr. Comparison of different labeling methods for two-channel high-density microarray experiments. Physiol Genomics. Sep. 3, 2002; 10(3):169-79.

[0143] Osborne, S E et al.: Aptamers as therapeutic and diagnostic reagents: problems and prospects. Curr Opin Chem Biol. June 1997; 1(1):5-9

[0144] Sambrook, Russell “Molecular Cloning, A Laboratory Manual”, Cold Spring Harbor Laboratory, N.Y., 2001

[0145] Schneider F, Kemmner W, Haensch W, Franke G, Gretschel S, Karsten U, Schlag P M. Overexpression of sialyltransferase CMP-sialic acid:Galbeta1,3GalNAc-R alpha6-Sialyltransferase is related to poor patient survival in human colorectal carcinomas. Cancer Res. Jun. 1, 2001; 61(11):4605-11.

[0146] Sperandio, M.: Selectins and glycosyltransferases in leukocyte rolling in vivo. FEBS J. October 2006; 273(19):4377-89

[0147] Stevens J, Blixt O, Glaser L, Taubenberger J K, Palese P, Paulson J C, Wilson I A. Glycan microarray analysis of the hemagglutinins from modern and pandemic influenza viruses reveals different receptor specificities. J Mol Biol. Feb. 3, 2006; 355(5): 1143-55

The application's sequence listing, which the Patent Office published only in electronic form, follows.

SEQUENCE LISTING (468 sequences)

SEQ ID NO: 1 - DNA, 2106 bp, Homo sapiens
actgccctccggccgccgcgccgcccgcccgccggggccccgctgtccgccgcccgccgccgctggagctagagatggatttgcagccgctgcaagtgtgtggaagggccgtgttcgtgttggcaaagaaggtcggctgctgagccagggcgtgtctcccggaggcctgtgggctgccaggatccccacctctctgcaatgggctgcccaggctgaccagccggttcctgctggaagctcctggtctgatctggggataccatgtccaagccccccgacctcctgctgcggctgctccggggcgccccaaggcagcgggtctgcaccctgttcatcatcggcttcaagttcacgtttttcgtctccatcatgatctactggcacgttgtgggagagcccaaggagaaagggcagctctataacctgccagcagagatcccctgccccaccttgacaccccccaccccaccctcccacggccccactccaggcaacatcttcttcctggagacttcagaccggaccaaccccaacttcctgttcatgtgctcggtggagtcggccgccagaactcaccccgaatcccacgtgctggtcctgatgaaagggcttccgggtggcaacgcctctctgccccggcacctgggcatctcacttctgagctgcttcccgaatgtccagatgctcccgctggacctgcgggagctgttccgggacacacccctggccgactggtacgcggccgtgcaggggcgctgggagccctacctgctgcccgtgctctccgacgcctccaggatcgcactcatgtggaagttcggcggcatctacctggacacggacttcattgttctcaagaacctgcggaacctgaccaacgtgctgggcacccagtcccgctacgtcctcaacggcgcgttcctggccttcgagcgccggcacgagttcatggcgctgtgcatgcgggacttcgtggaccactacaacggctggatctggggtcaccagggcccgcagctgctcacgcgggtcttcaagaagtggtgttccatccgcagcctggccgagagccgcgcctgccgcggcgtcaccaccctgccccctgaggccttctaccccatcccctggcaggactggaagaagtactttgaggacatcaaccccgaggagctgccgcggctgctcagtgccacctatgctgtccacgtgtggaacaagaagagccagggcacgcggttcgaggccacgtccagggcactgctggcccagctgcatgcccgctactgccccacgacgcacgaggccatgaaaatgtacttgtgaggggcccgccaggtcacctccccaacctgctcctgatggggcactgggccgcccttcccggggaggcaagattgagggcccgggagagggaggcccgagctgccaccgggcttaggcaggctgttgaggagctgtgggagcaggcccagtgggaggctgtggacaccccgaggacagtgtcctgtctcgaggcagggctgacacatggtgccatagccagcggagggcgctcagtgagtgccccgggccttctagacaacaggcaggaaggatgaacctcagggcacccccaggtggtgcggaaagccaggcagttgggacagaggtgcccacgagggcagaggccggtgctaaggggatggggaagaagggacaagattcccagagaggagaggaggctgttggtaggaaagtggcagggctgggggagacccagccccaagggtccggggcggaggatgctttgttcttttctggttttggttcctctttcgcggggggtgggggaggtcaacagggactgagtggggcagaggcccagaagtgccagcctggggagccgtttgggggcagccccttctgcccaccccatccttcttcctctccagagatgccaggggggcgtgtatgctctgccccttccctcagacaggggctgggtggggaggctctttaggctcaggagaagcattttaaagaaacccccaccctgccgcccgcattataaacacaggagaataatcaatagaataaaagtgaccgactgtcaaaaaaaaaaaaaaa

SEQ ID NO: 2 - DNA, 1292 bp, Homo sapiens
gttaactgcatttgcagctagaagttaggctctgattcactgttttgtattttctaaaagggttatatgtaatttgaaagatagacctgccaagacgtgagatctgtgttctccttggttagagctaacatttttggtgaggaaagcactgcaggagcaggctggcacagagaagaggacatgcggaaggagctccagctctccctgtcagtcaccttgctgcttgtctgtggcttcctctaccagttcaccctgaagtccagctgcctcttctgtttgccttctttcaagtcccaccaggggctggaagccctcctgagccacagacgtggcattgtgtttctagagacctcagagagaatggagccaccccatttggtctcctgttccgtagagtctgctgccaagatttatcctgagtggcctgtggtgttctttatgaagggtcttactgattccacaccgatgccctcaaactccacatacccagctttttccttcctgtcagcaatagacaacgttttcctcttccctttggatatgaaaaggctgcttgaagacacaccattgttttcatggtacaatcaaatcaacgccagcgcagagagaaactggctccacatcagctcggatgcatcccgcctggccatcatctggaaatacggtggcatctacatggacaccgatgtcatctccatcaggcccatccctgaggagaactttttggctgcgcaggcttctcggtactctagtaatggaatatttgggttcctcccccaccacccctttttgtgggaatgcatggaaaactttgttgaacactataattcagccatttggggcaaccaaggccctgagttgatgacaaggatgttgagggtatggtgtaaacttgaagacttccaggaggtgagcgacctcaggtgtctgaacatatccttcttacacccccaaagattttaccccatctcctatcgagagtggaggcgctactatgaagtgtgggatacagagccaagcttcaatgtctcttatgccctgcatttgtggaaccacatgaaccaggaggggcgggctgtgattagaggaagcaacacactggtggaaaatctctatcgcaagcactgtcccaggacttacagggacctgattaaaggcccagaggggtcagtgactggggagctgggtccaggtaacaaataaagctaacactcgtttgctgctgctgcagtgtggaaatggaaaaaaaaaaaaaaaaaaaaaaaaaaaaaaaaaaaaaaaaaaaaaaaaaa

SEQ ID NO: 3 - DNA, 2963 bp, Homo sapiens
cgcttcgctgcctggcggcctttccccgagccgagcccgcttcccgaggccgccagtcgtcgcctgcccgcgcctgcgcagcgtcccgggccgagagggccacggcggcggccatggcgcaccgctgtttgcggctgtggggccggggcggctgctggccccgcggcctacagcagctcctcgtgcctggcggcgtgggcccgggcgagcagccctgcctccggacgctttaccgatttgttacaactcaagcaagggccagcagaaattctcttttgacagatataattgctgcttatcaaagattctgttctcgacccccaaaaggatttggaaaatactttcctaatggaaaaaatggaaaaaaagctagtgaacctaaagaagttatgggagagaaaaaagaatcaaagccagctgctaccacacgctcttctggaggaggaggtggtggcggtggaaaacgaggtggcaagaaagatgattctcactggtggtccaggtttcagaagggtgacattccatgggacgacaaggatttcaggatgttcttcctctggactgctctgttctggggtggagtcatgttttacttgctgctcaagagatccgggagagaaatcacttggaaggactttgtcaataactatctttcaaaaggagtagtagacagattggaagtcgtcaacaagcgttttgttcgagtgacctttacaccaggaaaaactcctgttgatgggcaatacgtttggtttaatattggcagtgtggacacctttgaacggaatctggaaactttacagcaggaattgggcatagaaggagaaaatcgggtgcctgttgtctacattgctgaaagtgatggctcttttctgctgagcatgctgcctacggtgctcatcatcgccttcttgctctacaccatcagaagagggcctgctggcattggccggacaggccgagggatgggcggactcttcagtgtcggagaaaccactgccaaggtcttaaaggatgaaattgatgtgaagttcaaagatgtggctggctgtgaggaggccaagctagagatcatggaatttgtgaatttcttgaaaaacccaaagcagtatcaagacctaggagcaaaaatcccaaagggtgccattctcactggtcctccaggcactgggaagacgctgctagctaaggccacagccggagaagccaatgtccccttcatcaccgttagtggatctgagtttttggagatgttcgttggtgtgggccctgctagagtccgagacttatttgcccttgctcggaagaatgccccttgcatcctcttcatcgatgaaatcgatgcggtgggaaggaagagaggaagaggcaactttggagggcagagtgagcaggagaacacactcaaccagctgctggtggagatggatggttttaatacaacaacaaatgtcgtcattttggccggcaccaatcgaccagatatcctggaccccgcgctacttaggccggggcgtttcgacaggcagatctttattggaccaccagacataaaaggaagagcttctattttcaaagttcatctccgaccgctaaaactggacagtaccctggagaaggataaattggcaagaaaactggcatctttaactccagggttttcaggtgctgatgttgctaatgtctgtaatgaagctgcgttgattgctgcaaggcatctgtcagattccataaatcagaaacactttgaacaggcaattgagcgagtgattggtggcttagagaagaaaacgcaggttctgcagcctgaggagaagaagactgtggcataccacgaagcaggccatgcggttgccggctggtatctggagcacgcagacccgcttttaaaggtatccatcatcccacgtggcaaaggactaggttatgctcagtatttaccaaaagaacaatacctctataccaaagagcagctcttggataggatgtgtatgactttaggtggtcgagcctctgaagaaatcttctttggaagaattacaactggtgctcaagatgacttgagaaaagtaactcagagtgcatatgcccaaattgttcagtttggcatgaatgaaaaggttgggcaaatctcctttgacctcccacgtcagggggacatggtattggagaaaccttacagtgaagccactgcaagattgatagatgatgaagtacgaatacttattaatgatgcttataaaagaacagtagctcttctcacagaaaagaaagctgacgtggagaaggttgctcttctgttgttagaaaaagaagtattagataagaatgatatggttgaacttttgggccccagaccatttgcggaaaaatctacctatgaagaatttgtggaaggcactggcagcttggatgaggacacctcacttccagaaggccttaaggactggaacaaggagcgggaaaaggagaaagaggagcccccgggtgagaaagttgccaactagaggcccagagggaggccatctcagtctctccactgtggtttcagctggtgcattatttcagctgtggctttcagaagaatgggaatgctgcgctgattttagccagccactggcccagctgaaatgatggggaaaggagtccttagtcctttcagcctcagaggtcacagtgggtggcaggtgactttccggaggccttgagggaaatgcacactgtcccatagcctcattgggctcccagacgtgctggaaaggttgagcccagagtggccgaggctggaccctgtggcaccaagtggggtcggctgaccgtgtggcagggatcgttgcactggactcttggcgtgtgggaagggatgctttctctttgtcgcccactcttcattcctgtttctcctcagttcccctgtgcagatgggctgtgaaattaaattggagtcttgataagaacatttt

SEQ ID NO: 4 - DNA, 1982 bp, Homo sapiens
gcagaggaggagcgcacgccggcctcgaagaacttctgcttgggtggctgaactctgatcttgacctagagtcatggccatggcaaccaaaggaggtactgtcaaagctgcttcaggattcaatgccatggaagatgcccagaccctgaggaaggccatgaaagggctcggcaccgatgaagacgccattattagcgtccttgcctaccgcaacaccgcccagcgccaggagatcaggacagcctacaagagcaccatcggcagggacttgatagacgacctgaagtcagaactgagtggcaacttcgagcaggtgattgtggggatgatgacgcccacggtgctgtatgacgtgcaagagctgcgaagggccatgaagggagccggcactgatgagggctgcctaattgagatcctggcctcccggacccctgaggagatccggcgcataagccaaacctaccagcagcaatatggacggagccttgaagatgacattcgctctgacacatcgttcatgttccagcgagtgctggtgtctctgtcagctggtgggagggatgaaggaaattatctggacgatgctctcgtgagacaggatgcccaggacctgtatgaggctggagagaagaaatgggggacagatgaggtgaaatttctaactgttctctgttcccggaaccgaaatcacctgttgcatgtgtttgatgaatacaaaaggatatcacagaaggatattgaacagagtattaaatctgaaacatctggtagctttgaagatgctctgctggctatagtaaagtgcatgaggaacaaatctgcatattttgctgaaaagctctataaatcgatgaagggcttgggcaccgatgataacaccctcatcagagtgatggtttctcgagcagaaattgacatgttggatatccgggcacacttcaagagactctatggaaagtctctgtactcgttcatcaagggtgacacatctggagactacaggaaagtactgcttgttctctgtggaggagatgattaaaataaaaatcccagaaggacaggaggattctcaacactttgaatttttttaacttcatttttctacactgctattatcattatctcagaatgcttatttccaattaaaacgcctacagctgcctcctagaatatagactgtctgtattattattcacctataattagtcattatgatgctttaaagctgtacttgcatttcaaagcttataagatataaatggagattttaaagtagaaataaatatgtattccatgtttttaaaagattactttctactttgtgtttcacagacattgaatatattaaattattccatattttcttttcagtgaaaaattttttaaatggaagactgttctaaaatcacttttttccctaatccaatttttagagtggctagtagtttcttcatttgaaattgtaagcatccggtcagtaagaatgcccatccagttttctatatttcatagtcaaagccttgaaagcatctacaaatctctttttttaggttttgtccatagcatcagttgatccttactaagtttttcatgggagacttccttcatcacatcttatgttgaaatcactttctgtagtcaaagtataccaaaaccaatttatctgaactaaattctaaagtatggttatacaaaccatatacatctggttaccaaacataaatgctgaacattccatattattatagttaatgtcttaatccagcttgcaagtgaatggaaaaaaaaataagcttcaaactaggtattctgggaatgatgtaatgctctgaatttagtatgatataaagaaaacttttttgtgctaaaaatactttttaaaatcaattttgttgattgtagtaatttctatttgcactgtgcctttcaactccagaaacattctaagatgtacttggatttaattaaaaagttcactttgt

SEQ ID NO: 5 - DNA, 2442 bp, Homo sapiens
aggaggcggactctgtgaggaaacaagaagagaggcccaagatggagacggcggcggctgtagcggcgtgacaggagccccatggcacctgcccagccccacctcagcccatcttgacaaaatctaaggctccatggagccaccacggggcccccctgccaatggggccgagccatcccgggcagtgggcaccgtcaaagtatacctgcccaacaagcaacgcacggtggtgactgtccgggatggcatgagtgtctacgactctctagacaaggccctgaaggtgcggggtctaaatcaggactgctgtgtggtctaccgactcatcaagggacgaaagacggtcactgcctgggacacagccattgctcccctggatggcgaggagctcattgtcgaggtccttgaagatgtcccgctgaccatgcacaattttgtacggaagaccttcttcagcctggcgttctgtgacttctgccttaagtttctgttccatggcttccgttgccaaacctgtggctacaagttccaccagcattgttcctccaaggtccccacagtctgtgttgacatgagtaccaaccgccaacagttctaccacagtgtccaggatttgtccggaggctccagacagcatgaggctccctcgaaccgccccctgaatgagttgctaaccccccagggtcccagcccccgcacccagcactgtgacccggagcacttccccttccctgccccagccaatgcccccctacagcgcatccgctccacgtccactcccaacgtccatatggtcagcaccacggcccccatggactccaacctcatccagctcactggccagagtttcagcactgatgctgccggtagtagaggaggtagtgatggaaccccccgggggagccccagcccagccagcgtgtcctcggggaggaagtccccacattccaagtcaccagcagagcagcgcgagcggaagtccttggccgatgacaagaagaaagtgaagaacctggggtaccgggactcaggctattactgggaggtaccacccagtgaggtgcagctgctgaagaggatcgggacgggctcgtttggcaccgtgtttcgagggcggtggcatggcgatgtggccgtgaaggtgctcaaggtgtcccagcccacagctgagcaggcccaggctttcaagaatgagatgcaggtgctcaggaagacgcgacatgtcaacatcttgctgtttatgggcttcatgacccggccgggatttgccatcatcacacagtggtgtgagggctccagcctctaccatcacctgcatgtggccgacacacgcttcgacatggtccagctcatcgacgtggcccggcagactgcccagggcatggactacctccatgccaagaacatcatccaccgagatctcaagtctaacaacatcttcctacatgaggggctcacggtgaagatcggtgactttggcttggccacagtgaagactcgatggagcggggcccagcccttggagcagccctcaggatctgtgctgtggatggcagctgaggtgatccgtatgcaggacccgaacccctacagcttccagtcagacgtctatgcctacggggttgtgctctacgagcttatgactggctcactgccttacagccacattggctgccgtgaccagattatctttatggtgggccgtggctatctgtccccggacctcagcaaaatctccagcaactgccccaaggccatgcggcgcctgctgtctgactgcctcaagttccagcgggaggagcggcccctcttcccccagatcctggccacaattgagctgctgcaacggtcactccccaagattgagcggagtgcctcggaaccctccttgcaccgcacccaggccgatgagttgcctgcctgcctactcagcgcagcccgccttgtgccttaggccccgcccaagccaccagggagccaatctcagccctccacgccaaggagccttgcccaccagccaatcaatgttcgtctctgccctgatgctgcctcaggatcccccattccccaccctgggagatgagggggtccccatgtgcttttccagttcttctggaattgggggacccccgccaaagactgagccccctgtctcctccatcatttggtttcctcttggctttggggatacttctaaattttgggagctcctccatctccaatggctgggatttgtggcagggattccactcagaacctctctggaatttgtgcctgatgtgccttccactggattttggggttcccagcaccccatgtggattttggggggtcccttttgtgtctcccccgccattcaaggactcctctctttcttcaccaagaagcacagaattctgctgggcctttgcttgtttaaaaaaaaaaaaaaaaaaaaaaaaa

SEQ ID NO: 6 - DNA, 987 bp, Homo sapiens
aatataagtggaggcgtcgcgctggcgggcattcctgaagctgacagcattcgggccgagatgtctcgctccgtggccttagctgtgctcgcgctactctctctttctggcctggaggctatccagcgtactccaaagattcaggtttactcacgtcatccagcagagaatggaaagtcaaatttcctgaattgctatgtgtctgggtttcatccatccgacattgaagttgacttactgaagaatggagagagaattgaaaaagtggagcattcagacttgtctttcagcaaggactggtctttctatctcttgtactacactgaattcacccccactgaaaaagatgagtatgcctgccgtgtgaaccatgtgactttgtcacagcccaagatagttaagtgggatcgagacatgtaagcagcatcatggaggtttgaagatgccgcatttggattggatgaattccaaattctgcttgcttgctttttaatattgatatgcttatacacttacactttatgcacaaaatgtagggttataataatgttaacatggacatgatcttctttataattctactttgagtgctgtctccatgtttgatgtatctgagcaggttgctccacaggtagctctaggagggctggcaacttagaggtggggagcagagaattctcttatccaacatcaacatcttggtcagatttgaactcttcaatctcttgcactcaaagcttgttaagatagttaagcgtgcataagttaacttccaatttacatactctgcttagaatttgggggaaaatttagaaatataattgacaggattattggaaatttgttataatgaatgaaacattttgtcatataagattcatatttacttcttatacatttgataaagtaaggcatggttgtggttaatctggtttatttttgttccacaagttaaataaatcataaaacttgatgtgttatctctta

SEQ ID NO: 7 - DNA, 2022 bp, Homo sapiens
aggcggagggggcggggcttcggccggctaagccgcggccacccgcggtctgagggaccggaggagcggggccgggagctgcgaggagccctccagacgtcgccgagcgcgagggcgggcgtgctcggagtggtcgctcgtcagccgccgcccctcagtctccgcacttgcaggtcccctccctctccgccgggacgcgggagagcccggctcgcggcgggggcggccaatgcgaaactggctggtgctgctgtgcccgtgtgtgctcggggccgcgctgcacctctggctgcggctgcgctccccgccgcccgcctgcgcctccggggccggccctgcagatcagttggccttatttcctcagtggaaatctactcactatgatgtggtagttggcgtgttgtcagctcgcaataaccatgaacttcgaaacgtgataagaagcacctggatgagacatttgctacagcatcccacattaagtcaacgtgtgcttgtgaagttcataataggtgctcatggctgtgaagtgcctgtggaagacagggaagatccttattcctgtaaactactcaacatcacaaatccagttttgaatcaggaaattgaagcgttcagtctgtccgaagacacttcatcggggctgcctgaggatcgagttgtcagcgtgagtttccgagttctctaccccatcgttattaccagtcttggagtgttctacgatgccaatgatgtgggtttccagaggaacatcactgtcaaactttatcaggcagaacaagaggaggccctcttcattgctcgcttcagtcctccaagctgtggtgtgcaggtgaacaagctgtggtacaagcccgtggaacaattcatcttaccagagagctttgaaggtacaatcgtgtgggagagccaagacctccacggccttgtgtcaagaaatctccacaaagtgacagtgaatgatggagggggagttctcagagtcattacagctggggagggtgcattgcctcatgaattcttggaaggtgtggagggagttgcaggtggttttatatatactattcaggaaggtgatgctctcttacacaaccttcattctcgccctcaaagacttattgatcatataaggaatctccatgaggaagatgccttactgaaggaggaaagcagcatctatgatgatattgtttttgtggatgttgtcgacacttatcgtaatgttcctgcaaaattattgaacttctatagatggactgtggaaacaacgagcttcaatttgttgctgaagacagatgatgactgttacatagacctcgaagctgtatttaataggattgtccaaaagaatctggatgggcctaatttttggtggggaaatttcagactgaattgggcagttgaccgaaccggaaagtggcaggagttggagtacccgagccccgcttaccctgcctttgcatgtgggtcaggatatgtgatctccaaggacatcgtcaagtggctggcaagcaactcggggaggttaaagacctatcagggtgaagatgtaagcatgggcatctggatggctgccataggacctaaaagataccaggacagtctgtggctgtgtgagaagacctgtgagacaggaatgctgtcttctcctcagtattctccgtgggaactgacggaactgtggaaactgaaggaacggtgcggtgatccttgtcgatgtcaagcaagataacagggacttgaattagcagagtctaaaatcagggcaggcaaacgataatctgagtgcaagtctgaggagtcccagggtttagcagtagactgtatggtctttcaagagagttccagactggcactttcacccagaaccaatgcggtgtttcttaatgtttgcacaaatttccttaaaaatcaacttgtactgtagcataagaaaagtttttatttatctattggaagattatcagaaaaataccaagttattttataaaagaaaaaatatttctaaaaaaaaaaaaaaaa

SEQ ID NO: 8 - DNA, 2168 bp, Homo sapiens
ggctacgcagcttgctcctggcacgggcaccttgaatctcctcctcacacagatggagaccatgcttgatttcctgaacttgtagtaagaagaaggaaaacacagcacgctggagccaacagagttaagaggaagatttatgagtcatggaaccctccatcagatttggaagaaagtagaatgagcgcagaggtgacagacagccactgaggcccatggacaatctccacctcacgcttctctatcaaacttgaagatttattagtaatatgctgcctttggaagatgaaaacaaactagtgccaaggaggcgtattcttcaatatttggaatagacgtgttctcaagacaatggcttcaaaggtctcctgtttgtatgttttgacagttgtgtgctgggccagcgctctctggtacttgagtataactcgccctacttcttcttacactggctccaaaccattcagccacctaacagttgccaggaaaaacttcacctttggcaacataagaactcgacctatcaacccacattcttttgaatttcttatcaacgagcccaataaatgtgagaaaaacattccttttcttgttatcctcatcagcaccactcacaaggaatttgatgcccgtcaggcaatcagagagacgtggggggatgagaacaactttaaggggatcaagatagccaccctgttcctcctgggcaagaatgctgatcctgttctcaatcagatggtggagcaagagagccaaatcttccatgatatcatcgtggaggactttattgactcctaccataaccttaccctcaaaacattaatggggatgagatgggtggccactttttgttcaaaagccaagtatgtcatgaaaacagacagcgacatttttgtaaacatggacaatcttatttataaattactgaaaccctccaccaagccacgaagaaggtattttactggctatgtcattaatggaggaccgattcgggatgtccgcagtaaatggtatatgcccagggatttgtacccagacagtaactacccacctttctgttcggggactggctacatcttttcagccgatgtagctgaactcatttacaagacctcactccacacaaggctgcttcaccttgaagacgtatatgtgggactgtgtcttcgaaagctgggcatacatcctttccagaacagtggcttcaatcactggaaaatggcctacagtttgtgtaggtatcgccgagttatcactgtgcatcagatctctccagaagaaatgcacagaatctggaatgacatgtcaagcaagaaacatctcagatgttaggatttttaccaatgtaaatatgtttcttttctttttttaagaaatgggacctaaggtgttggtattttccaggtgtcgggggaaatgaactggtgaaggggttttgtaaagtttttgcttcctgctataagttcttttcttggattaccaatttatgaatgttagactctggtcatagaaacaataaatgagttagaagggccagatttcattctcagtcccagagcattgctatttatctcaaaaagtgacttccaaacaactcttaggattgacgtaccgtgcatctgagataaaaatttggttctgggaaactgaaactcacagtaatgtgtcatatcatccctgcaaaaattaatacacaaatagaaaccattttcaaaagcaattcagaaaggatgcacagtcaggaagacacactggatgtgattattaatatcgtgtgtgttgttacattatatttttacatatattcccatgtaatgtgtacagtctttgcagttccaccaagaaatgaacttggtacctgcagagtggctgcagttaaatagatgggagtttaaatttgagaatcaaacattctatgtgtttggaagacaactctgcttgctcatccaaggattaaatctggtcagcaggtggaatgtgtataaaatgctacttaacaaagtaaacaaaagattttttttttctttttttttctttcttttttgttttgctctttcagaacaaacattaaatggtgcctccaaggaaactttgccaaatataatctcacctgcttccttccagacagtgtcgctaagtgcatttcacagtttttggatctggcaggc

SEQ ID NO: 9 - DNA, 3215 bp, Homo sapiens
cctgtgcagcagctgaggaaccgtggatttcatattatagactaaaaccccattaaaactgctcaaaatccttcctgcagctgccaggcaacaacgaaagaagagaggtaaatcctattcttttccaatacaactgaagcactacattttagctctggctgctttacattgcagctcagtgttattagtagaaatatggatactgagacgagaacacagcactgcattgtccagccaggaaaaatagcagatgtaaaaagcttcaatgcatcaactgtcgggaagagtcaacagtgctacaagcagaacgggcaactacagctcttttgtttaacgaaagagagaatatgaaagaaagggaaaatttcagaagactaggacccatatgaacaaggagggtaactcgaagacaagcagacagatggacactttggatactgtgaaaagcaatcgcaggaggcagactgttgggggatgtgcgcatgttcgatagcatcttttttgctgaagtgatggcgtgccaaaagtattttcagtgggcataatcctcttcacataaatggcctgaccaaggagaatgactacaagagagacaatgtgactgaattagaaaatgattgccaaagaatagtattaaggagaagaaaacatttttgtcaccaatctctcatataccactactggatatttacaacatgcttcagtggaggagaagacactgctgctttgcaaagatgacctggaatgccaaaaggtctctgttccgcactcatcttattggagtactttctctagtgtttctttttgctatgtttttgtttttcaatcatcatgactggctgccaggcagagctggattcaaagaaaaccctgtgacatacactttccgaggatttcggtcaacaaaaagtgagacaaaccacagctcccttcggaacatttggaaagaaacagtccctcaaaccctgaggcctcaaacagcaactaactctaataacacagacctgtcaccacaaggagttacaggcctggagaatacacttagtgccaatggaagtatttacaatgaaaaaggtactggacatccaaattcttaccatttcaaatatattattaatgagcctgaaaaatgccaagagaaaagtccttttttaatactactaatagctgcagagcctggacaaatagaagctagaagagctattcggcaaacttggggcaatgaaagtctagcacctggtattcaaatcacaagaatatttttgttgggcttaagtattaagctaaatggctaccttcaacgtgcaatactggaagaaagcagacaatatcatgatataattcaacaggaatacttagatacgtactataatttgaccattaaaacactaatgggcatgaactgggttgcaacatactgtccacatattccatatgttatgaaaactgacagtgacatgtttgtcaacactgaatatttaatcaataagttactgaagccagatctgcctcccagacataactatttcactggttacctaatgcgaggatatgcacccaatcgaaacaaagatagcaagtggtacatgccaccagacctctacccaagtgagcgttatcctgtcttctgttctggaactggttatgttttttctggagatctggcagaaaagatttttaaagtttctttaggtatccgccgtttgcacttggaagatgtatatgtagggatctgtcttgccaagttgagaattgatcctgtaccccctcccaatgagtttgtgttcaatcactggcgagtctcttattcgagctgtaaatacagccacctaattacctctcatcagttccagcctagtgaactgataaaatactggaaccatttacaacaaaataagcacaatgcctgtgccaacgcagcaaaagaaaaggcaggcaggtatcgccaccgtaaactacattagaaaagacaattttttttcaatgtgcaatttgtaaatattgctaaaagcatgtatagttaggaactgattacatccgtaggacaagttttagttaaaactcatcacataaagaaattcaagaagtatttttttaatttctgaagaagttaattcttaaaactataacattatataacaaaaaaggtttcccaaaacaatctatttaaaaaactgtataaggagattctgtgtattaacatgcaataacaagcatgcataaatcaatggttcaagtcttctgttagggggccaataaaatgtatctgcatatgttttccacataaattttaattcaagaaatgacagtcaaaagatccttcattttagattaagcttttcattttaatatataatttaatgtaaataaaacatcactatcaattttaaggaaactttttaattgtgcaaaggataaattttttgacctattttagggttctaaatgcaataagatttagttgagttattccacaaacacattataaagttcagatgtttcatcaatgcagttctcacgaaagtatttactttttaaaaataactgagatattattttaaatttcttttattaatactttcttttattaatatatgggggaaaattattttgacatgacgtggtaaaatgtgaaaaactaatgtgtctcaggctcaagtttttatagttattaaatgtttcaaaatagacaagttttgtttcctcattgatgttaagaaccaaactcctatttcaatgagttattggattagaccaattactgcactcttaaacagcaccaccatttaatttcatgtaatatctaacttcgaatatatctgtaaaggataatcgaagcaaaagtaatcacttaaaggcacaaataggatgtactgttgaaaaagataaagagtgcaggtgcagtttcattcaacacatttttaagatgcatgtctgccaaaatgcaacatacgggaagtttatttcctgacagcaggtgtacacatgccaacacttaatcattttatggcacctatttctttcttggagtgccaagtttgcaaacctgcagtttttaatttggtagatgacaaatattctgaatcaccaattaaaaacctttttgggagggatggggaaaactacaaacgtttgacaaacacaattctaggatgaacaatgtatacaatgcacttttatgaagtttttaaaaataaaggaaaacaaaaaacttt

SEQ ID NO: 10 - DNA, 1704 bp, Homo sapiens
gaggcgggggaggggccgtgagtgccgcagtcggccagccatggagcggagcttgctggcggcgaggccgcggcgacaaggtagccacccccgcagcatgcctcgaccgcggtccgcagctgcaccgcctctccccgccccccagggtgcgctggtcccggtcgcgcgctcagacctccgcatcccgggcgtggtcggttaagtccccggccgtgacccaggcccggggagctagtctccgcccttcgctcttacggatcccctcggagtacgccgcaccatgcagctcaggctcttccggcgcctccttctcgccgctttgctgctggtgatcgtctggaccctcttcgggccttcggggttgggggaggagctgctgagcctctcactagcctccctgctcccagcccccgcctcaccggggccgcccctggccctgccccgcctcttgatccccaaccaggaagcttgcagtggtcccggggcccctcccttcctgctcatcctggtgtgcacggctccggagaacctgaaccagagaaacgccattcgggcttcgtggggcgggctgcgcgaggcccgggggctcagggtacagacgctattcttgctgggagagccgaacgcacagcaccccgtgtggggttcccaggggagtgacctggcctcggagtcagcagcccagggggatatcttgcaggccgccttccaggactcctaccgcaacctcaccctaaagaccctcagcgggctgaactgggctgagaaacactgccccatggcccgatacgtcctcaagacggacgatgatgtgtatgtcaacgtccctgaactggtatcagagctggtcttgcgagggggccgttgggggcaatgggagagaagcacggaaccccagagagaggctgagcaggaaggaggccaggttttgcacagcgaggaagtgcctcttctgtacttgggccgggtgcactggcgcgtgaacccctctcggacaccggggggcaggcaccgcgtatcagaggagcagtggcctcacacctggggcccctttccaccctatgcctcaggcacggggtatgtgctgtcagcgtctgctgtgcagctcattctcaaggtggccagccgggcaccccttctcccattagaggatgtctttgtgggggtaagtgcccgacgaggaggcctcgccccaacacagtgtgtcaagctggctggtgccacccactacccgctagaccggtgctgctatgggaaattcctgctgacgtcccacaggctggacccctggaagatgcaggaagcctggaagctggtgggtggctctgacggggaaaggactgcgcccttttgctcctggttccagggagtcctgggcatcctgcggtgtcgagcaatagcctggcttcagagctgagagtgcctggggccacaggaaaggcaggaacaggaccttctctctcccaggcccaacgcaggggccctcactggctgcagctgatctgtttccttataccagatcctcagtctcactaaagacagcgatatgggagacacccaggggcctggcccgccagcccaaaagatggtcatcgggaagagaaaaagaaaaaaatgctgcagttgttctctcaagctagggcagaagaggggtgtcaagctcctcaataaacttgtctccacttcaaaaaaaaaaaaaaaaaa

SEQ ID NO: 11 - DNA, 2793 bp, Homo sapiens
ggcctgggccgccggcccggcgcgggcgccatgaagctgctgcggcgggcgtggcggcggcgggcggcgctaggcctgggcacgctggcgctgtgcggggcggcgctgctctacctggcgcgctgcgcggccgagcccggggaccccagggcgatgtcgggccgcagcccgcctccccccgcgcccgcgcgcgccgccgccttcctggcagtgctggtggccagcgcgccccgcgccgccgagcgccgcagcgtgatccgcagcacgtggcttgcgcggcgcggggccccgggcgacgtgtgggcgcgctttgccgtgggcacggccggcctgggcgccgaggagcggcgcgccctggagcgggagcaggcgcggcacggggacctgctgctgctgcccgcgctgcgcgacgcctacgaaaacctcacggccaaggtgctggccatgctggcctggctggacgagcacgtggccttcgagttcgtgctcaaggcggacgacgactccttcgcgcggctggacgcgctgctggccgagctgcgcgcccgcgagcccgcgcgccgccgccgcctctactggggcttcttctcgggccgcggccgcgtcaagccgggggggcgctggcgcgaggccgcctggcaactctgcgactactacctgccctacgcgctgggcggcggctacgtgctctcggccgacctggtgcactacctgcgcctcagccgcgactacctgcgcgcctggcacagcgaggacgtgtctctgggcgcctggctggcgccggtggacgtccagcgggagcacgacccgcgcttcgacaccgaataccggtcccgcggctgcagcaaccagtacctggtgacgcacaagcagagcctggaggacatgctggagaagcacgcgacgctggcgcgcgagggccgcctgtgcaagcgcgaggtgcagctgcgcctgtcctacgtgtacgactggtccgcgccgccctcgcagtgctgccagagaagggagggcatcccctgagccgccgcggcccggccctccgggacacctgcttcacccggcggcgccttggggcaggtgccgagcgggcgcactacgcccgggccccaaggcccccgtcccgcagccacgcttgtggtcgctgcgtcccggtctgcgtttgggagacccctgggggttgccggggcagcgcgccgtgtccaggtggaggtgcccgttcctggacctcagcgagcctgagccgggcccggccgcacgctgacccccgtgctgtccccgaccggctcacggggctgggctccgatcttccgtgtctcttatcagtggcgtttctcacgtctgcgtctcagatctaacgtggtttcacatcaatccgctttcatgggattttggtctctgtccagtgacttcgtggtaaatgtaactcagtgtttgcttgcgacttatttataaatattgtaagtttgtgtcgatgagtgtaagttggcagtgcgcacgtctcggtttttttacatgatttaaggaaagacttttatgtcagaacttggtgcctgtaccgtcaaccccgctgctgcccgtgtttaaacgcaggagaactttaaaactggccatctatcttttcagtgtacaagtcactgaacccattgtttctttctgaagagactttcctttcaaggcttcccatgggtccgcgccacacagggccggtgctgctttatttcagactctgccccaggttccaggaatccgaaccccggagtgctgacgcggttccccaacttccgccttaagaaaacaggaccagccggcaccaggcccgtctctcacgtactttaacacatccttgaaagcccctcgtttaatgagaaaagcgaacactgcggtccttgccaaagtaaaatgaagctgccccaggacaaggggttaccatgagctccctggagtccgacgcgggttttctctctgggggacctgggtggtccccgctgtggtctttgttgtcccactttgggaccgggtccagtctggggtctagtctcgagcatcagggtcaggctcggggcagggctgggttaggctccgggtcagtcttgccatgggtttgggagcaggtttgggttacttgcgtttgaaggcagcagtggtctcaggaggaagaaacgggggcgggagagagtggtgatctgtggtcagtgggtcagtgacctgcacggtgattctcccacctccaaaaggtaggggtgggactggaggcgtccctaggtcaggccgttgagttcgagctccgatgggccaccttgaatccaggactgaccgcccgtgtgtgcacagtttgttcttggacgaggactcgtgaggatcgagggctggggaccccggtgtgagcaggatggggccctgccctcccgtgggagttgtggactcgagcccaggggctgcccgtcacagcggtgtcccaggtccctgccatccgattttacctgggatgtcttctctggagtttggaattgcttgaggaaccctgcgtgtgcttggagaggccagagggcttgctgagaaccccatggacagtggagagcgggattcgaaccaagggctggactcccacacctctggcctgcgtcgcccagttctttgtggctctgaagaattggccgctgtggaaaagagcaaatgtccgagacccccaacaggaagagtctaaaaatccagtttgcaaccacttctgacctacaaaaaaatggaaatttagtgtttttcagcctaagacattaaatttcatatcagaacaaa

SEQ ID NO: 12 - DNA, 2077 bp, Homo sapiens
gcggcgggcggggcggcgctcggggctcggctggcctcggctcgcctcggctgcgctcggcaggctgcggtaaatccgggcttgcggccgctggcgtagtctgtggccgggtggtcgttgctgcgcgccccgagccccgagagccatgcagatgtcctacgccatccggtgcgccttctaccagctgctgctggccgcgctcatgctggtggcgatgctgcagctgctctacctgtcgctgctgtccggactgcacgggcaggaggagcaagaccaatattttgagttctttcccccgtccccacggtccgtggaccaggtcaaggcgcagctccgcaccgcgctggcctctggaggcgtcctggacgctagcggcgattaccgcgtctacaggggcctgctgaagaccaccatggaccccaacgatgtgatcctggccacgcacgccagcgtggacaacctgctgcacctgtcgggtctgctggagcgctgggagggcccgctgtccgtgtcggtgttcgcggccaccaaggaggaggcgcagctggccacggtgctggcctacgcgctgagcagccactgccccgacatgcgcgccagggtcgccatgcacctcgtgtgcccctcgcgttacgaggcagccgtgcccgacccccgggagccgggggagtttgccctgctgcggtcctgccaggaggtctttgacaagctagccagggtggcccagcccgggattaattatgcgctgggcaccaatgtctcctaccccaataacctgctgaggaatctggctcgtgagggggccaactatgccctggtgatcgatgtggacatggtgcccagcgaggggctgtggagaggcctgcgggaaatgctggatcagagcaaccagtggggaggcaccgcgctggtggtgcctgccttcgaaatccgaagagcccgccgcatgcccatgaacaaaaacgagctggtgcagctctaccaggttggcgaggtgcggcccttctattatgggttgtgcaccccctgccaggcacccaccaactattcccgctgggtcaacctgccggaagagagcttgctgcggcccgcctacgtggtaccttggcaggacccctgggagccattctacgtggcaggaggcaaggtgcccaccttcgacgagcgctttcggcagtacggcttcaaccgaatcagccaggcctgcgagctgcatgtggcggggtttgattttgaggtcctgaacgaaggtttcttggttcataagggcttcaaagaagcgttgaagttccatccccaaaaggaggctgaaaatcagcacaataagatcctatatcgccagttcaaacaggagttgaaggccaagtaccccaactctccccgacgctgctgagcccttccctcccctaatctgagaagtcagcctcttggctcctcaggccaccatttaggcctgactggggtaagaaatgtcgctccactttacagaggtagctgtggtgttgaaacactggacttggatatggggtgctgggatcgattcctagctttaccactaactagctgtgtggccttgagtaaatcccgttacctctctgagcctcggttaccctgtctgtaaaaagggaggtgagaatacctacctcacggaactgttgggaggctcagatgagatgctatatgtgaaaacattctgtaagcttcgtacaaatgtgaagtattaatattatcgcagtattattgttgttattattattgttattattaacaatcttgggtgggtagtaggagagcaaaaagtatgaatgggatggagctaagaagtctgaatacttaatgaaatggactttttggaaagaaatcagatgaaggcataaaatttagttcttagctcttgaacagaagcctaaaattcctggttctctcagggcttcgccttcaagggttctggaggagggaagggtctgcaggttccatgggtgacagcctgagatctgtcccttcaacgggctgggctgggtatgtgcctaccgatgacaatgtgtaaataaatgcgtgttcacacccacaaaaaaaa

SEQ ID NO: 13 - DNA, 2788 bp, Homo sapiens
ggcgcagcggcagcggcagcagcggcaacaagtgccggaggctagcagagccaagccggagcagtccctgccgccgacaccgccgggccgcccgtccggggcgccgcgcatggagcgtgagctgcggcggtcgccgggctgagccgcgcggagcggccgggacgtggatgtggccgcgatctcccgcccttgcccccgccccgccgagctggagctgctcccggacaagatatgagaaatgagtgttggacgtcgaagaataaagttgttgggtatcctgatgatggcaaatgtcttcatttattttattatggaagtctccaaaagcagtagccaagaaaaaaatggaaaaggggaagtaataatacccaaagagaagttctggaagatatctacccctcccgaggcatactggaaccgagagcaagagaagctgaaccggcagtacaaccccatcctgagcatgctgaccaaccagacgggggaggcgggcaggctctccaatataagccatctgaactactgcgaacctgacctgagggtcacgtcggtggttacgggttttaacaacttgccggacagatttaaagactttctgctgtatttgagatgccgcaattattcactgcttatagatcagccggataagtgtgcaaagaaacctttcttgttgctggcgattaagtccctcactccacattttgccagaaggcaagcaatccgggaatcctggggccaagaaagcaacgcagggaaccaaacggtggtgcgagtcttcctgctgggccagacacccccagaggacaaccaccccgacctttcagatatgctgaaatttgagagtgagaagcaccaagacattcttatgtggaactacagagacactttcttcaacttgtctctgaaggaagtgctgtttctcaggtgggtaagtacttcctgcccagacactgagtttgttttcaagggcgatgacgatgtttttgtgaacacccatcacatcctgaattacttgaatagtttatccaagaccaaagccaaagatctcttcataggtgatgtgatccacaatgctggacctcatcgggataagaagctgaagtactacatcccagaagttgtttactctggcctctacccaccctatgcagggggaggggggttcctctactccggccacctggccctgaggctgtaccatatcactgaccaggtccatctctaccccattgatgacgtttatactggaatgtgccttcagaaactcggcctcgttccagagaaacacaaaggcttcaggacatttgatatcgaggagaaaaacaaaaataacatctgctcctatgtagatctgatgttagtacatagtagaaaacctcaagagatgattgatatttggtctcagttgcagagtgctcatttaaaatgctaaaatagatacaaactcaattttgcatagaaaggtgtattttgaatagttcccatgttgtgttctcacattagagtaatttctatattaaaccatgaaaattgcctttatgagtgatacccatttgagggcctctaaacccttcaatttggtactcacgtgaagagggaaagcggaagatggtaatttttttttatggatgatatggcaggatgattggttctgatcttaccggctagtggtcatttttaaaaaacttgtaccctcttatctgaaatcctgtttctggaatttggccattttaagtgattttgtttgccctcttctataatattcctacttcccataataatgactgatttatttgtaattcaggtatttataaacctattggctacaaagactttgttaaacattatccagtggttttcgtgaaatggaattatgtttatttttatgggatttgggtaaattttaaattgtctagaaaactgaaatttcagttgtcagttgtggaattcagtttttcaattgtggaaatttcctgccaccccaacagtatttttgtgtgttaattaattttgcaaaatgagaatcatggtgtgacactcatctaatttatcttgttgtgatgttatggtcataataaggagaaagagggtttaatttttcttgtatttggtttcctggtggtatcatagtgtaattttagtatttgaaaatcagtgtgattccttaatggccaactgaagattgaattgccgctaacaaccatatcgtgttagtgaattttcaatatggaccaggaaggcatatgtattttgaacttgagtgaaaaggttgaagttacagacttttgcatagatggtttgtcaatttaaaattccagaatttattattgccatattttcacatgctgcttatacaagattattattgagtagtaactgcttccctgtctatgtagaagtgcctgtgtttttatttattgttcagatcaaagaccaaaacattttcttaaatatattttatgtaatattttatttgtatacagtgttgttgatgaaatatttaactagagcatgatattttaaatgttaaggtgtaacatatgttaaataaaactgttatttttgaattttaaaatttgttttttgggggtatgaactactagagtttaaaattctgccaaactattacttatatgtactattgtgtaacatactttcttgaaatatttttgtttatagaattgaaggttcttatcagatgggatactggggactataaacaatggaaataaagccactgtatttttaaaaaaaaaaaaaaaaaaaaaaaaaaaaaaaaaaaaaaaaa

SEQ ID NO: 14 - DNA, 2720 bp, Homo sapiens
agaggggcgggagctctggctcaggtaaaaactctttcttcggctcgcgagctgagaggagcaggtagaggggcagaggcgggactgtcgtctgggggagccgcccaggaggctcctcaggccgaccccagaccctggctggccaggatgaagtatctccggcaccggcggcccaatgccaccctcattctggccatcggcgctttcaccctcctcctcttcagtctgctagtgtcaccacccacctgcaaggtccaggagcagccaccggcgatccccgaggccctggcctggcccactccacccacccgcccagccccggccccgtgccatgccaacacctctatggtcacccacccggacttcgccacgcagccgcagcacgttcagaacttcctcctgtacagacactgccgccactttcccctgctgcaggacgtgcccccctctaagtgcgcgcagccggtcttcctgctgctggtgatcaagtcctcccctagcaactatgtgcgccgcgagctgctgcggcgcacgtggggccgcgagcgcaaggtacggggtttgcagctgcgcctcctcttcctggtgggcacagcctccaacccgcacgaggcccgcaaggtcaaccggctgctggagctggaggcacagactcacggagacatcctgcagtgggacttccacgactccttcttcaacctcacgctcaagcaggtcctgttcttacagtggcaggagacaaggtgcgccaacgccagcttcgtgctcaacggggatgatgacgtctttgcacacacagacaacatggtcttctacctgcaggaccatgaccctggccgccacctcttcgtggggcaactgatccaaaacgtgggccccatccgggctttttggagcaagtactatgtgccagaggtggtgactcagaatgagcggtacccaccctattgtgggggtggtggcttcttgctgtcccgcttcacggccgctgccctgcgccgtgctgcccatgtcttggacatcttccccattgatgatgtcttcctgggtatgtgtctggagcttgagggactgaagcctgcctcccacagcggcatccgcacgtctggcgtgcgggctccatcgcaacgcctgtcctcctttgacccctgcttctaccgagacctgctgctggtgcaccgcttcctaccttatgagatgctgctcatgtgggatgcgctgaaccagcccaacctcacctgcggcaatcagacacagatctactgagtcagcatcagggtccccagcctctgggctcctgtttccataggaaggggcgacaccttcctcccaggaagctgagacctttgtggtctgagcataagggagtgccagggaaggtttgaggtttgatgagtgaatattctggctggcgaactcctacacatccttcaaaacccacctggtactgttccagcatcttccctggatggctggaggaactccagaaaatatccatcttctttttgtggctgctaatggcagaagtgcctgtgctagagttccaactgtggatgcatccgtcccgtttgagtcaaagtcttacttccctgctctcacctactcacagacgggatgctaagcagtgcacctgcagtggtttaatggcagataagctccgtctgcagttccaggccagccagaaactcctgtgtccacatagagctgacgtgagaaatatctttcagcccaggagagaggggtcctgatcttaaccctttcctgggtctcagacaactcagaaggttggggggataccagagaggtggtggaataggaccgccccctccttacttgtgggatcaaatgctgtaatggtggaggtgtgggcagaggagggaggcaagtgtcctttgaaagttgtgagagctcagagtttctggggtcctcattaggagcccccatccctgtgttccccaagaattcagagaacagcactggggctggaatgatctttaatgggcccaaggccaacaggcatatgcctcactactgcctggagaagggagagattcaggtcctccagcagcctccctcacccagtatgttttacagattacggggggaccgggtgagccagtgaccccctgtagcccccagcttcaggcctcagtgtctgccagtcaagcttcacaggcattgtgatggggcagccttggggaatataaaattttgtgaagacttggagatctttttttttttttaagcaaatttacaagtttcaacagacaagtccacattcatccctaaaagtctcattttccagtagaaaatatacactggtaaaaacggggcatggggccgtggctcagggctgtaattctagcacattgggagaccaaagtgggaggatcacttgagcccaggagttctggatcctgtctctgcacaaaataaaaaattactcaggcgtggtggtgctcacatgcctgtagtcccagctatacttgggaggctgaggcgagaggatcgcttgagcccaggagttggaggctgcagtgaaccatgattgcgccactgtactccactgggcggcaataagaagacaaaaacataaaacaggacatgtgtgaggcaaaagctgcaggaatttctatcaggcagatctgacctcatcccacccaccccctgctcagatacccttcatagctccttattgctttcagctcataaccccacat

SEQ ID NO: 15 - DNA, 1554 bp, Homo sapiens
attcccacctcctccagaagccccgcccactcccgagccccgagagctccgcgcacctgggcgccatccgccctggctccgctgcacgagctccacgcccgtaccccggcgtcacgctcagcccgcggtgctcgcacacctgagactcatctcgcttcgaccccgccgccgccgccgcccggcatcctgagcacggagacagtctccagctgccgttcatgcttcctccccagccttccgcagcccaccagggaaggggcggtaggagtggccttttaccaaagggaccggcgatgctctgcaggctgtgctggctggtctcgtacagcttggctgtgctgttgctcggctgcctgctcttcctgaggaaggcggccaagcccgcaggagaccccacggcccaccagcctttctgggctcccccaacaccccgtcacagccggtgtccacccaaccacacagtgtctagcgcctctctgtccctgcctagccgtcaccgtctcttcttgacctatcgtcactgccgaaatttctctatcttgctggagccttcaggctgttccaaggataccttcttgctcctggccatcaagtcacagcctggtcacgtggagcgacgtgcggctatccgcagcacgtggggcagggtggggggatgggctaggggccggcagctgaagctggtgttcctcctaggggtggcaggatccgctcccccagcccagctgctggcctatgagagtagggagtttgatgacatcctccagtgggacttcactgaggacttcttcaacctgacgctcaaggagctgcacctgcagcgctgggtggtggctgcctgcccccaggcccatttcatgctaaagggagatgacgatgtctttgtccacgtccccaacgtgttagagttcctggatggctgggacccagcccaggacctcctggtgggagatgtcatccgccaagccctgcccaacaggaacactaaggtcaaatacttcatcccaccctcaatgtacagggccacccactacccaccctatgctggtgggggaggatatgtcatgtccagagccacagtgcggcgcctccaggctatcatggaagatgctgaactcttccccattgatgatgtctttgtgggtatgtgcctgaggaggctggggctgagccctatgcaccatgctggcttcaagacatttggaatccggcggcccctggaccccttagacccctgcctgtatagggggctcctgctggttcaccgcctcagccccctcgagatgtggaccatgtgggcactggtgacagatgaggggctcaagtgtgcagctggccccataccccagcgctgaagggtgggttgggcaacagcctgagagtggactcagtgttgattctctatcgtgatgcgaaattgatgcctgctgctctacagaaaatgccaacttggttttttaactcctctcaccctgttagctctgattaaaaacactgcaacccaaaaaaaaaaaaaaaaaaaaaaaaaaaaaaaaaaaaaaaaaaaaaaaaaaa

SEQ ID NO: 16 - DNA, 4131 bp, Homo sapiens
atcccgcccgcatacagcccgcatcccgccggggaagcgagcccagtccagcgctgcccgtccagtcctcgcccaagatttaaagcccgcaagttttgttcttgagaccagcgactttagctccgatgcgggaaggaaagccgacctccgatttggacatttaaagagctgggcttgaacttcgtgagtttcgctctaaactgcccttgaaatgaagctggacttggaggtggcatggaatattcacatgggagagccgcatgaggccgcccaccacgcttcctgaaggatgcccgtgtggaagaattttgacgtgccagtgtcctcgttctacagggtgttccattcttccgcaatctcagaaaaatgggactaaaagaaactattttgtaaaataagaagacttccatttttaatgaccaacatgtattaagatggacacctactctacgaaacacgaagttctatggtctcgaagaagcccgtgcctgtttaaaactgatcctaactaaaaacagacttgagtggatatgagaatgttggttagtggcagaagagtcaaaaaatggcagttaattattcagttatttgctacttgttttttagcgagcctcatgtttttttgggaaccaatcgataatcacattgtgagccatatgaagtcatattcttacagatacctcataaatagctatgactttgtgaatgataccctgtctcttaagcacacctcagcggggcctcgctaccaatacttgattaaccacaaggaaaagtgtcaagctcaagacgtcctccttttactgtttgtaaaaactgctcctgaaaactatgatcgacgttccggaattagaaggacgtggggcaatgaaaattatgttcggtctcagctgaatgccaacatcaaaactctgtttgccttaggaactcctaatccactggagggagaagaactacaaagaaaactggcttgggaagatcaaaggtacaatgatataattcagcaagactttgttgattctttctacaatcttactctgaaattacttatgcagttcagttgggcaaatacctattgtccacatgccaaatttcttatgactgctgatgatgacatatttattcacatgccaaatctgattgagtaccttcaaagtttagaacaaattggtgttcaagacttttggattggtcgtgttcatcgtggtgcccctcccattagagataaaagcagcaaatactacgtgtcctatgaaatgtaccagtggccagcttaccctgactacacagccggagctgcctatgtaatctccggtgatgtagctgccaaagtctatgaggcatcacagacactaaattcaagtctttacatagacgatgtgttcatgggcctctgtgccaataaaatagggatagtaccgcaggaccatgtgtttttttctggagagggtaaaactccttatcatccctgcatctatgaaaaaatgatgacatctcatggacacttagaagatctccaggacctttggaagaatgctacagatcctaaagtaaaaaccatttccaaaggtttttttggtcaaatatactgcagattaatgaagataattctcctttgtaaaattagctatgtggacacatacccttgtagggctgcgtttatctaatagtacttgaatgttgtatgttttcactgtcactgagtcaaacctggatgaaaaaaacctttaaatgttcgtctataccctaagtaaaatgaggacgaaagacaaatattttgaaagcctagtccatcagaatgtttctttgattctagaagctgtttaatatcacttatctacttcattgcctaagttcatttcaaagaatttgtatttagaaaaggtttatattattagtgaaaacaaaactaaagggaagttcaagttctcatgtaatgccacatatatacttgaggtgtagagatgttattaagaagttttgatgttagaataattgcttttggaaaataccaaatgaacgtacagtacaacatttcaaggaaatgaatatattgttagaccaggtaagcaagtttatttttgttaaagagcacttggtggaggtagtaggggcagggaaaggtcagcataggagagaaagttcatgaatctggtaaaacagtctcttgttcttaagaggagatgtagaaaaatgtgtacaatgttattataaacagacaaatcacgtcttaccacatccatgtagctactggtgttagagtcattaaaatacctttttttgcatcttttttcaaagtttaatgtgaacttttagaaaagtgattaatgttgccctaatactttatatgtttttaatggatttttttttaagtattagaaaatgacacataacacgggcagctggttgctcatagggtccttctctagggagaaaccattgttaattcaaataagctgattttaatgacgttttcaactggtttttaaatattcaatattggtctgtgtttaagtttgttatttgaatgtaatttacatagaggaatataataatggagagacttcaaatggaaagacagaacattacaagcctaatgtctccataattttataaaatgaaatcttagtgtctaaatccttgtactgattactaaaattaacccactcctccccaacaaggtcttataaaccacagcactttgttccaagttcagagttttaaattgagagcattaaacatcaaagttataatatctaaaacaatttatttttcatcaataactgtcagaggtgatctttattttctaaatatttcaaacttgaaaacagagtaaaaaagtgatagaaaagttgccagtttggggttaaagcatttttaaagctgcatgttccttgtaatcaaagagatgtgtctgagatctaatagagtaagttacatttattttacaaagcaggataaaaatgtggctataatacacactacctcccttcactacagaaagaactaggtggtgtctactgctagggagattatatgaaggccaaaataatgacttcagcaagagtgactgaactcactctaaggcctttgactgcagaggcacctgttagggaaaatcagatgtctcatataataaggtgatgtcggaaacacgcaaaacaaaacgaaaaaagatttctcagtatacacaactgaatgatgatacttacaatttttagcaggtagctttttaatgtttacagaaattttaatttttttctattttgaaatttgaggcttgtttacattgcttagataatttagaatttttaactaatgtcaaaactacagtgtcaaacattctaggttgtagttactttcagagtagatacagggttttagatcattacagtttaagttttctgaccaattaaaaaaacatagagaacaaaagcatatttgaccaagcaacaagcttataattaatttttattagttgattgattaatgatgtattgccttttgcccatatataccctgtgtatctatacttggaagtgtttaaggttgccattggttgaaaacataagtgtctctggccatcaaagtgatcttgtttacagcagtgcttttgtgaaacaattatttatttgctgaaagagctcttctgaactgtgtccttttaatttttgcttagaatagaatggaacaagtttaaatttcaaggaaatatgaaggcacttcctttttttctaagaaggaagttgctagatgattccttcatcacacttacttaaagtactgagaagagtatctgtaaataaaagggttccaaccttttaaaaaagaaggaaaaaactttttggtgctccagtgtagggctatctttttaaaaaatgtcaacaaagggaaaataaactatcagcttggatggtcacttgaatagaagatggttatacacagtgttattgttaaaatttttttaccttttggttggtttgcatcttttttccatattgttaattttataccaaaatgttaaatatttgtattacttgaattttgctcttgtatggcaaaataattagtgagtttaaaaaaaatctatagtttccaataaacaactgaaaaattatcatgaaaaaaaaa

SEQ ID NO: 17 - DNA, 2510 bp, Homo sapiens
gaacctcagtgtgtgaagtaaagggattaaaggctagtctcaggctggggatggctcctgtctatttcttctctctcagagactgcagatggcttttccctgccgcaggtccctgactgccaagactctggcctgcctcctggtgggcgtgagtttcttagcactgcagcagtggttcctccaggcgccaaggtccccgcgggaggagaggtccccgcaggaggagacgccagagggtcccaccgacgctcccgcggctgacgagccgccctcggagctcgtccccgggcccccgtgcgtggcgaacgcctcggcgaacgccacggccgacttcgagcagctgcccgcgcgcatccaggacttcctgcggtaccgccactgccgccacttcccgctgctttgggacgcaccggccaagtgcgccggcggccgaggcgtgttcctgctcctggcggtgaagtcggcgcctgagcactacgagcgacgcgagctcatccggcgcacgtgggggcaagagcgcagctacggcgggcggccagtgcgccgcctctttctattgggcaccccgggccccgaggacgaggcgcgcgcggagcggctggcggagctggtggcgctggaggcgcgcgagcacggcgacgtgctgcagtgggccttcgcggacaccttcctcaacctcacgctcaagcacctgcacttgctcgactggctggctgcacgctgcccgcacgcgcgctttctgctcagcggcgacgacgacgtgttcgtgcacaccgccaacgtagtccgcttcctgcaggcgcagccacccggccgccacctgttctccggccagctcatggagggctccgtgcccatccgcgacagctggagcaagtacttcgtgccgccgcagctcttccccgggtccgcttacccggtgtactgcagcggcggcggcttcctcctgtccggccccacggcccgggccctgcgcgcggccgcccgccacaccccgctcttccccatcgacgacgcctacatgggcatgtgtctggagcgcgccggcctggcgcccagcggccacgagggcatccggcccttcggcgtgcagctgcctggcgcacagcagtcctccttcgacccctgcatgtaccgcgagttgctgctagtgcaccgcttcgcgccctacgagatgctgctcatgtggaaggcgctgcacagccccgcgctcagctgtgaccggggacaccgggtctcctgaggccagttgggcggcttcagccccgggcctccaaccatgtccatgctgagaaggcagctttcccgctctgggtaccttacgtcctgcccagctctgtgcacctgaaccccagctgcgcactgaaatcagctggggtggggggtgtggaaaatgcctacatcctggctccatctcccgaagtttcgatttgattagtctggggtggacccagacatgttaagtattttttaagttcctccagtgatgcgaatgtgcagctaggcctgaggaccactcggctagactatctcttcatcctcgcaaagccagctccaccgccctctctgcaagaattccgggcccctcgctcccacactcgggtcctcttgagcagtggagcaagggagacctgggagcgtgggagccaggatcagcgccccctgccatgtgcctacaaatgtcagttgtgatttccactgtttacaagtgagtggagctggagctgggctgacagtatcaggtggatcccgcttccccctcccccaagaagtcagccaacacgcagctgaggcgcatgtggtggccttcttcccaccactaccccagtacaccgtgaggtagaaatcttcaccgtgcaaagtggaaaccagaggcccggtcagacagtgactaatccagggccgtggcattcccagacagcacaccactgtggtcccctccacactcaccccaaccaaagctaatggcctagttgggtcctgcccgccaataatcacccccacgggtcagagacaggctccttgccggggtctgggcctcaggctcagtgggccttggacaacccagcagggagttccggggagtccgaagtggagaaaggctggtgggaacatggaggccagtgttggggagcctgtggaggcaggtgtgtagaattgtgttcgggaggtgggggatctgagaccgaagtggacagtggttaagattgtggggccgggcgaggtggctcacgcctgtaatcccagcactttgggaggctgaggaggtcggatcatgaggtcaagagttcgagaccagcctggccaatatggtgaaaccccgtctctattgggagtacaaaaattagccggccatagtggctcgtgcctgtaatctcagctatttgggaggctgaggcaggagaatcacttgaacctgggaggcggaggttgcagtgagccgagatcgtgccactgcactccagcctgggcgacagagcaagactgcatctcaaaaaaaaaaaaaaaaa

SEQ ID NO: 18 - DNA, 1434 bp, Homo sapiens
gggttaaggcacctgggccaccgcccctgccggcccctcctcccgcggccgggaagaggaaagtcgcggcgggggcgcggcccggtctccgtccccacccgcccgccgtcccgccggcccgagccgtggcgcccagagctgcgagccgctcgcccctccgccgctccggcccgggccgccatgtcgctgtggaagaaaaccgtctaccggagtctgtgcctggccctggccctgctcgtggccgtgacggtgttccaacgcagtctcacccctggtcagtttctgcaggagcctccgccacccaccctggagccacagaaggcccagaagccaaatggacagctggtgaaccccaacaacttctggaagaacccgaaagatgtggctgcgcccacgcccatggcctctcaggggccccaggcctgggacgtgaccaccactaactgctcagccaatatcaacttgacccaccagccctggttccaggtcctggagccgcagttccggcagtttctcttctaccgccactgccgctacttccccatgctgctgaaccacccggagaagtgcaggggcgatgtctacctgctggtggttgtcaagtcggtcatcacgcagcacgaccgccgcgaggccatccgccagacctggggccgcgagcggcagtccgcgggtgggggccgaggcgccgtgcgcaccctcttcctgctgggcacggcctccaagcaggaggagcgcacgcactaccagcagctgctggcctacgaagaccgcctctacggcgacatcctgcagtggggctttctcgacaccttcttcaacctgaccctcaaggagatccacttcctcaagtggctggacatctactgcccccacgtccccttcattttcaaaggcgacgatgacgtcttcgtcaaccccaccaacctgctagaatttctggctgaccggcagccacaggaaaacctgttcgtgggcgatgtcctgcagcacgctcggcccattcgcaggaaagacaacaaatactacatcccgggggccctgtacggcaaggccagctatccgccgtatgcaggcggcggtggcttcctcatggccggcagcctggcccggcgcctgcaccatgcctgcgacaccctggagctctacccgatcgacgacgtctttctgggcatgtgcctggaggtgctgggcgtgcagcccacggcccacgagggcttcaagactttcggcatctcccggaaccgcaacagccgcatgaacaaggagccgtgctttttccgcgccatgctcgtggtgcacaagctgctgccccctgagctgctcgccatgtgggggctggtgcacagcaatctcacctgctcccgcaagctccaggtgctctgaccccagccgggctactaggacaggccagggcacttgctcctgagcccc

SEQ ID NO: 19 - DNA, 1894 bp, Homo sapiens
tcttcctccagctgttcccacaggctccattattcaaactttgggggaggaaatcagggctggacagatcatcaactgctgctgctgacagactgtgttcctgccatgatggggacaggcctgccccaaaccaggctgtctcaccagaaaccagccctaacacgccagagccccatctctcaggtcggcctcctgccctcctccctccctccctccctccctctctcctgcctcagccccgccccggcccctggggccctccctgctcccgctccactcccctccccgcccctctggactggctgggcagggctgggccccgccggtcgacaacacaggggctggggcaggcagatcagagggagctgagggaggcctgacctgaggccggcacccggagctggcgggagccagacccagagctcccgcggccgccccttccctgggccgggtcatgcgctgccccaagtgccttctctgcctgtcagcactgctcacactcctgggcctcaaagtgtacatcgagtggacatccgagtcccggctcagcaaggcctaccccagccctcggggcaccccgccaagccccacgccagccaaccctgagcccaccctacctgccaacctctccacccgcctgggccagactatcccgctgccctttgcttactggaaccagcagcagtggcggctggggtccctgcccagtggggacagcactgaaacggggggctgccaggcttggggggccgccgccgccaccgagatccctgacttcgcctcctaccccaaggacctccgccgcttcttgctgtcagcagcctgccggagcttcccacagtggctgcctggaggtggtggcagccaagtctccagctgctcagatactgatgtcccctacctgctgttggccgtcaagtcagaaccagggcgctttgcagaacgacaggccgtgagagagacgtggggcagtccagctccagggatccggctgctcttcctgctagggtctccggtgggtgaggcggggcctgacctagactcactagtggcctgggagagccgtcgctacagtgacctgctgctctgggacttcctcgacgtcccattcaaccagacgctcaaagacctgctgctgctggcctggctgggccgccactgccccaccgtgagttttgtcttgcgagctcaggacgatgcctttgtacacacccctgccctgctggctcacctgcgggccctgccacctgcctcggcccgaagcctctacctgggtgaggtctttacccaggccatgcctctccggaagccaggaggacccttctatgtgcccgagtccttcttcgaaggtggctacccagcctatgcaagcgggggtggctacgtcattgccgggcgcctggcaccctggctgctgcgggcggcagcccgtgtggcacccttcccctttgaggacgtctacactggcctttgcatccgagccctgggcctggtgccccaggcccacccaggcttcctcacagcctggccagcagaccgcactgcggaccactgtgctttccgcaacctgctgctggtacggcccctgggcccccaggccagcattcggctctggaaacaactgcaagacccaaggctccagtgctgactctcattggggagggcggaggtgctgacctggcctgggcctctggggccggcccctggctcagcccctccttccaggtcttgatgggagggaggagggcccagaagctggacaacttaagccactccttggcctcccccagccaggggcctgggcaggaaagatggggtggtggactgtttttgcctactttttgtttttgaaaaacatgcactccccactctgaaaaaaaaaaaaaaaaaaaaa

SEQ ID NO: 20 - DNA, 1383 bp, Homo sapiens
gccgaagcggcgggatgagcggagccggcgtgggcggggcgtccgaggagagccaggccatgcaggcccacgtgtctattatcctcccagtccacaacgctgaaccgtggctggacgaatgtttgaggtctgttttgcaacaggactttgaaggtaccatggagctgtctgttttcaatgatgccagtaaggacaagtctggggctatcattgaaaaatggagagtgaagctggaagattctggtgtccacgtgatcattggggggcacgattctccctctcctagaggcgtcggatacgctaaaaatcaagcagttgcccagagctcagggtcttacctttgctttttggattcggatgacgtcatgatgccccagcgggtgaggctgcaacacgaggctgccgttcagcacccgtcgagcatcattggttgcagagtgaggagagatccccctaactccaccgaacgatacacacgttggatcaaccagctgacgccggagcagctcctaacccaggttttcacctcaaatggccccacggtgatcatgcccacctggttctgctcgcgagcgtggttctcccacgtgggcccctttaacgagggaggtcagggcgtcccggaggacctgctgttcttctacgagcacctcaggaagggcggcggcgtcatccgcgtggaccagagtctcctgctgtatcgccaccacccacaggcggccacgcactgcgtcctcgagacgaccatctggacccaccgcgtccgcttcctggaagagcaggccctgccccgctgggcggccttcaccatctggaacgctggcaagcaggggcgccggctgtaccgcagcttgactgccggcagccagcgcaaggtggtggcattctgtgacgtggacgagaacaagatcaggaaaggcttctattgccacgaggactctcaggaaagacccaagccccgaatccccatcctgcacttccgagccgcccggccacccttcgtcatctgcgtgaagctggacctcacagggggcgcctttgaggacaacctgaggtcactgcacttgcaggagggccaggacttccttcacttcagctgacggacccatggcagctgctcccagtgcatcccaggccagcaggagctttgtgagctgcaggcatggcgatggtgcgcctgttccacacccagcaggcgcaaccagagtctcgtgtgtgccgaccacaggagccaagccttttccactgtgtggactcatgtggccaaggctaggcctggtcacccaggaccctcaccacgtgaccccagccaatcgggacagttcaaggaggaggagacccctattacacaggttggaataaaatatttaaatctcgtaaaaa

SEQ ID NO: 21 - DNA, 3010 bp, Homo sapiens
cgcattccccgcgcggagccgaagcagccgcaacgagccgggagctgagccgcgctgcgctgcggtgcgaagagccgggcggcggccagagccctccccgcgctgccagtgggacgcggagccagggatccccggctttgccccggggctggggtgcaacagactcttaacttggtcctcgcgccccgccaaccgcccccgggcaggaaacgcccagaaccaccaccgcgccgcgctccacaaaagccccgggagttccaagacgggagggatcgggcgcgctccagaggcaggagggtcccccacaccctcaggctcatgcccagctcccccatcgggcagcccccagccccatgaggaccctcaggccggggcgagagcccggcacagcccggaccgaaattttgccgctgccttagagcgttagacaggatgtggctgggccgccgggccctgtgcgctctggtccttctgctcgcctgcgcctcgctggggctcctgtacgcgagcacccgggacgcgcccggcctccggctacctcttgcgccgtgggcgcccccgcaaagcccccgcaggcccgagctgccagatcttgctcctgagccccgctacgcacacatcccggtcaggatcaaggagcaagtagtggggctgctggcttggaacaactgcagttgtgagtccagtggggggggcctccccctccccttccagaaacaagtccgagctattgacctcaccaaggcctttgaccctgcagagctgagggctgcctctgccacaagagagcaggagttccaggcctttctgtcgaggagccagtccccagctgaccagctgctcatagcccctgccaactccccgctccagtaccccctacagggtgtggaagttcagcccctcaggagcatcttggtgccagggctgagccttcaggcagcttctggtcaggaggtataccaggtgaacctgactgcctccctaggcacctgggacgtggcaggggaagtgactggagttactctcactggagagggtcaggcagatctcacccttgtcagcccagggctggaccaactcaacaggcaactacaactggtcacttacagcagccgaagctaccagaccaacacagcagacacagtccggttctccaccgagggacatgaggctgctttcactatccgcataagacacccgcccaaccctcggctgtacccacctgggtctctaccccagggagcccagtacaacatcagcgctctagtcacgattgccaccaagaccttcctccgttatgatcggctacgggctctcatcaccagtatccgccgcttctacccaacggttaccgtggtcatcgctgacgacagcgacaagccagagcgcgttagtggcccctacgtggaacactatctcatgcccttcggcaagggctggttcgcaggccggaacctggccgtgtctcaagtaaccaccaagtacgtgctgtgggtggacgacgacttcgtcttcacggcgcggacgcggctggagaggcttgtggacgtgctggagcggacgccgctggacctggtggggggcgcggtgcgcgagatctccggctttgccaccacttatcggcagctgctgagcgtggagcccggcgccccaggcctcgggaactgcctccggcaaaggcgcggcttccaccacgagctcgtcggcttcccaggctgcgtggtcaccgacggcgtggttaacttcttcctggcgcggactgacaaggtgcgcgaggtcggtttcgacccccgcctcagccgcgtggctcatctggaattcttcttggatgggcttggttcccttcgggttggctcctgctccgacgtcgtggtggatcatgcatccaaactgaagctgccttggacatcaagggatgccggagcagagacttacgcccggtaccgttacccaggatcactggacgagagccagatggccaaacaccggctgctcttcttcaaacaccggctgcagtgcatgacctcccagtgatggcccgctggggatttctgactgtcaggctgggcctgcctccttgtccctgccaggaatttccaacaaaccccaccaccctgtgagcactctactggctgtccctgagcctctagttcctcactcttccttttcagaacctgatgcccagtaggggttgtcctggtgacacccctcctttttccagtgcccagaggcctggtggagccataacctctcccacagccagtgccaagtcctccccctgcccattctcatggggcaggaaatggggggatcactttccaagtgccaaagagcccagagggactctaagaacctaaggtggaaacactgtcctctcatcttgggaccgagggggtggggaagttccccaacacataatcccaagactgtgcccctcatctgcatcttcagatccagtactctgtgtacctgctccagccccacccccacagagagaacttgtggctctggggctggggtgagggctggtggttggtgaaagccattcttagttgtgtctctgcaatgctgtgggcacaaaagaaggggcaccagagtccctgtgcaaacacctagactcacttcatggattccaaagctctcagcttcattttattagttacgttaggtaagggggttcaagggtcatggtcctcatcacacacatgtcatcagggccctctgcactccacatgatgaggtcagacccacacggtgcaaatctttgggtcagtgagctcctggagaagagaggagacatgtcaggaatagattaggcacccctcttccttaatgaaatgtggcagtcctctcaggggtaccccacctacttagggatctgagttcttcagttcctcacccatagctcagcccgggctccctgatttggtcttcaatctactattcattccgtccccacccttttcttcttgatcttcctcagaccctttcccaaacccctctccctggg

SEQ ID NO: 22 - DNA, 1792 bp, Homo sapiens
ataggtggctgcagaggcgaggtgacggcgcgtgcggaacgaactctgcacccccaggaatggggagcgctggcttttccgtgggaaaattccacgtggaggtggcctctcgcggccgggaatgtgtctcggggacgcccgagtgtgggaatcggctcgggagtgcgggcttcggggatctctgcttggaactcagaggcgctgacccagcctggggcccgtttgctgcccacgggaggagccgccgtcagggctcgagatttctgtggctcctcaagatattggtcataatcctggtacttggcattgttggatttatgttcggaagcatgttccttcaagcagtgttcagcagccccaagccagaactcccaagtcctgccccgggtgtccagaagctgaagcttctgcctgaggaacgtctcaggaacctcttttcctacgatggaatctggctgttcccgaaaaatcagtgcaaatgtgaagccaacaaagagcagggaggttacaactttcaggatgcctatggccagagcgacctcccagcggtgaaagcgaggagacaggctgaatttgaacactttcagaggagagaagggctgccccgcccactgcccctgctggtccagcccaacctcccctttgggtacccagtccacggagtggaggtgatgcccctgcacacggttcccatcccaggcctccagtttgaaggacccgatgcccccgtctatgaggtcaccctgacagcttctctggggacactgaacacccttgctgatgtcccagacagtgtggtgcagggcagaggccagaagcagctgatcatttctaccagtgaccggaagctgttgaagttcattcttcagcacgtgacatacaccagcacggggtaccagcaccagaaggtagacatagtgagtctggagtccaggtcctcagtggccaagtttccagtgaccatccgccatcctgtcatacccaagctatacgaccctggaccagagaggaagctcagaaacctggttaccattgctaccaagactttcctccgcccccacaagctcatgatcatgctccggagtattcgagagtattacccagacttgaccgtaatagtggctgatgacagccagaagcccctggaaattaaagacaaccacgtggagtattacactatgccctttgggaagggttggtttgctggtaggaacctggccatatctcaggtcaccaccaaatacgttctctgggtggacgatgattttctcttcaacgaggagaccaagattgaggtgctggtggatgtcctggagaaaacagaactggacgtggtaggcggcagtgtgctgggaaatgtgttccagtttaagttgttgctggaacagagtgagaatggggcctgccttcacaagaggatgggatttttccaacccctggatggcttccccagctgcgtggtgaccagtggcgtggtcaacttcttcctggcccacacggagcgactccaaagagttggctttgatccccgcctgcaacgagtggctcactcagaattcttcattgatgggctagggaccctactcgtggggtcatgcccagaagtgattataggtcaccagtctcggtctccagtggtggactcagaactggctgccctagagaagacctacaatacataccggtccaacaccctcacccgggtccagttcaagctggccctccactacttcaagaaccatctccaatgtgccgcataaaggtgtgagggcataggagaaacactaggctg

SEQ ID NO: 23 - DNA, 3438 bp, Homo sapiens
atggggagcccccgggccgcgcggcccccgctgctcctgcgcccggtgaagctgctgcggaggcgcttccggctgctgctggcgctcgccgtggtgtctgtggggctctggactctgtatctggaactggtggcgtcggcccaggtcggcgggaaccccctgaaccggaggtacggcagctggagagaactggccaaggctctggccagcaggaacattccagctgtggatccacacctccagttctaccatccccagaggctgagcctcgaggaccacgacattgaccaaggggtgagcagtaacagcagctacttgaagtggaacaagcctgtcccctggctctcagagttccggggccgtgccaacctgcatgtgtttgaagactggtgtggcagctctatccagcagctcaggaggaacctgcatttcccactgtacccccatattcgcacaaccctgaggaagcttgctgtgtcccccaaatggaccaactatggcctccgcatctttggctacctgcacccctttactgatgggaaaatccagtttgccattgctgcagatgacaacgcggagttctggctgagcctcgatgaccaggtctcaggcctccagctgctggccagtgtgggcaagactggaaaggagtggaccgccccgggagagtttgggaaatttcggagccaaatttccaagccggtgagcctgtcagcctcccacaggtactacttcgaggtgctgcacaagcagaatgaggagggcaccgaccacgtggaagttgcatggcgacggaacgaccctggagccaagttcaccatcattgactccctctccctgtccctcttcacaaatgagacgttcctacagatggatgaggtgggccacatcccacagacagcagccagccacgtggactcctccaacgctcttcccagggatgagcagccgcccgctgacatgcttcggcctgacccccgggacaccctctatcgagtgcctctgatccccaagtcgcatctccgccacgtcctgcctgactgtccctacaaacccagctatctggtggatgggcttcctctgcagcgctaccagggactccggtttgttcatctgtcttttgtttaccccaatgactatacccgcctgagccacatggagacccacaataaatgtttctaccaggaaaacgcctactaccaagaccggttcagctttcaggagtacatcaagattgaccagcctgagaagcaggggctggagcagccaggttttgaggaaaaccttctagaagagtcccagtatggggaagtggcagaggagacccctgcctccaacaaccagaatgccaggatgcttgagggaagacagacacctgcctccaccctggagcaagatgccactgactaccgcctccgaagcctgcggaaactcctggctcagccccgggagggcctgctggcccccttctccaagcggaactccacagcgtccttcccagggaggaccagccacattccagtgcagcagccagagaagaggaagcaaaaacccagccctgagcccagccaagattcacctcattccgacaagtggcctcctgggcaccctgtgaagaacctgcctcagatgagggggcccaggcccaggcccgctggtgacagccccaggaagactcagtggctgaaccaggtggagtcgtacatcgcagagcagagacggggtgacaggatgcggcctcaggcccctggaaggggctggcatggggaggaggaagtggtggcggccgcaggccaggaaggacaagtggagggagaggaagagggggaagaagaggaggaggaagaggatatgagtgaggtgttcgagtacgtacctgtgtttgacccggtagtaaactgggaccagaccttcagtgcccggaatctcgacttccaagccctgaggactgactggatcgatctgagctgtaacacatctggcaacctgctgcttccagagcaggaagctctggaggtcacgcgagtcttcttgaagaagctcaaccagaggagccgggggaggtaccagctacagcgcattgtgaacgtggaaaagcgtcaggaccagctacgtgggggtcgctacctcctggagcttgaactgttggaacaaggccagcgcgtggtgcggctctcggagtatgtgtctgcacgaggctggcagggcatcgatccagctggtggggaggaggtcgaggcccggaacctgcaaggcctggtctgggacccacacaaccgtaggagacaggtcctgaatacccgggcccaagagcccaagctgtgctggcctcagggtttctcctggagtcaccgagccgtggtccacttcgtcgtgcctgtgaagaaccaggcacgctgggtacagcaattcatcaaagacatggaaaacctgttccaggtcaccggtgacccacacttcaacatcgtcatcactgactatagcagtgaggacatggatgttgagatggcactgaagaggtccaagctgcggagctaccagtacgtgaagctaagtggaaactttgaacgctcagctggacttcaggctggcatagacctcgtgaaggacccgcacagcatcatcttcctctgtgacctccacatccacttcccagctggagtcatcgatgccattcggaagcactgtgtggagggaaagatggcctttgcccccatggtgatgaggctgcattgtggggccaccccccagtggcctgagggctactgggaggtgaatgggttcgggctgcttggcatctacaagtctgacctggacaggattgggggcatgaacaccaaggagttccgagaccgctggggcggggaagactgggagctgctggacaggatactccaagcgggcctggacgtggagcgtctctccctcaggaatttcttccatcatttccattccaagcgaggcatgtggagccgtcgccagatgaagacgctgtagccggagggtgtccgcggggcccagcactccccgctctggactagcagtggctccccagggccctgctactgttcagggatggggagtggggtgacggctggaccccaagaggcctcgaagctgacggcccactccacctggagctgtcccctcacagaggcaggttccggggctcctgtctctgcctcctgggccttcagaagggaggactttgagagagaggccaggagggaccacttgctcagtcgagaacgggaagagctcctgagaaggacgggtcaggaaggagagatctgactgagcgacaccatcctcatccatgaaggtgcacgcccacatcccccaagcgctcctcacgccaagcgctgaccaccagaccctcttctagtggacatattttattggggggcggggattttaaaaacagaaaaccgaaactgc

SEQ ID NO: 24 - DNA, 3120 bp, Homo sapiens
atgccgcggctcccggtgaagaagatccgtaagcagatgaagctgctgctgctgctgctgctgctgagctgcgccgcgtggctcacctacgtgcacctgggcctggtgcgccagggacgcgcgctgcgccagcgcctgggctacgggcgagatggtgagaagctgaccagtgagaccgacggccggggggtccacgctgcgccatccacacagagggctgaggactccagtgagagccgtgaagaggagcaagcgcccgaaggtcgggacctagacatgctgtttcctgggggggctgggaggctgccactgaacttcacccatcagacacccccatggcgggaggagtacaaggggcaggtgaacctgcacgtgtttgaggactggtgtgggggcgccgtgggccacctgaggaggaacctgcacttcccgctgttccctcatacgcgcaccaccgtgaagaagttggccgtgtcccccaagtggaagaactatggactccgtatttttggtttcatccacccggcgagggacggagacgtccagttttctgtggcctcagacgacaactcggagttctggctgagtctggacgagagccctgctgctgcccagcttgtggcctttgtgggcaagactggctccgagtggacagcgcctggagaattcaccaagttcagctcccaggtgtccaagcccaggcggctcatggcctcccggaggtactactttgagttgctgcacaagcaggacgaccgcggctcggaccacgtggaagtgggctggcgagctttcctgcccggcctgaagttcgaggtcatcagctctgctcacatctccctgtacacagatgagtcagccttgaagatggaccacgtggcgcacgtcccccagtctccagccagccacgtgggggggcgtccgccgcaggaggagaccagcgcagacatgctgcggccagatcccagggatacctttttcctcactccacgcatggaatcttcgagcctggagaacgtgctggagccctgcgcctacgcccccacctacgtggtcaaggacttcccgatcgccagataccagggcctgcaatttgtgtacctgtccttcgtttatcccaacgactacactcgcctcacccacatggagacggacaacaagtgcttctaccgcgagtctccgctgtatctggagaggtttgggttctataaatacatgaagatggacaaggaggagggggatgaggatgaagaagacgaggtgcagcgccgagccttcctcttcctcaacccggacgacttcctggacgacgaggacgagggggagctgctcgacagcctggagcccaccgaggcggccccgcccaggagcggcccccagtcccccgccccagcagcccccgcccagcccggagccaccctcgccccgccgacccctccccgcccccgggacggggggacccccaggcactcccgggccctgagctgggccgccagggccgcccgccctttgccgctcttcttgggccgagctccgcccccgcgccctgcagtggagcagccgcccccaaaggtgtacgtgaccagggtgcggccgggacagcgggcatccccccgggccccagcgccgcgtgcgccctggccgcccttccctggcgtcttcctgcaccccaggcctctgcccagagtgcagctgcgggcgcccccacgcccaccccggccccacggccgcaggaccggcggcccccaggccacacagccgaggcccccagcccgggcgcaggccacccaagggggccgggagggccaggcgcgcacgctgggacctgcggcgcccacagtggactcaaacttgtcctccgaagcgcggcccgtgacctccttcctgagcttgtcccaggtgtccgggccgcagctgcccggggagggcgaagaggaggaggaaggggaggacgatggggccccgggcgacgaggccgcgtcggaggacagcgaggaggccgcgggcccggcgctcggacgctggcgtgaggacgccatcgactggcagcgcacgttcagcgtgggcgccgtggacttcgagctgctgcgctcggactggaacgacctgcgatgcaacgtttcggggaacctgcagctgccggaggcggaggccgtggacgtgaccgctcagtacatggagcggctgaacgcgcgccacggcgggcgcttcgcgcttctgcgcatcgtgaacgtggagaagcgccgggactcggcgcgagggagtcgcttcctgctggagctggagctgcaggagcgcgggggcggccgcctgcgactgtccgagtacgtcttcctgcggctgccgggagcccgcgtaggggatgcagacggagaaagtcccgaacccgctcccgccgcctccgtgcgccccgacggccgccccgagctctgccggccactgcgcctggcctggcgccaggacgtgatggttcacttcatcgtgccagtgaaaaaccaggcacggtgggtggcacagttcctggcggacatggctgcgctgcacgcgcgcaccggggactcgcgtttcagcgtcgtcctggtggatttcgagagcgaggatatggacgtggagcgggccctgcgcgccgcgcgcctgccccggtaccagtacctgagacgaaccgggaacttcgagcgctccgccgggctgcaggcgggagtggacgcggtagaggacgccagcagcatcgtgttcctctgcgacctgcacatccacttcccacccaacatcctggacggcatccgcaagcactgcgtggagggcaggctggccttcgcgcccgtggtcatgcgcctgagctgcgggagctcgccccgggacccccacggttactgggaggtgaacggctttggcctttttgggatctacaagtcggactttgaccgggttggaggaatgaacacggaggagttccgagaccagtgggggggtgaagactgggagctcctggacagggtcctgcaggcagggctggaggtggagcggctccgactgcggaatttctatcaccactaccactccaagaggggcatgtggagcgtccgcagcaggaagggctctcgcacgggggcgtcttga

SEQ ID NO: 25 - DNA, 4080 bp, Homo sapiens
gcgcctgcggcgccgcgggcgggtcgcctcccctcctgtagcccacacccttcttaaagcggcggcgggaagatgaggcttcgggagccgctcctgagcggcagcgccgcgatgccaggcgcgtccctacagcgggcctgccgcctgctcgtggccgtctgcgctctgcaccttggcgtcaccctcgtttactacctggctggccgcgacctgagccgcctgccccaactggtcggagtctccacaccgctgcagggcggctcgaacagtgccgccgccatcgggcagtcctccggggagctccggaccggaggggcccggccgccgcctcctctaggcgcctcctcccagccgcgcccgggtggcgactccagcccagtcgtggattctggccctggccccgctagcaacttgacctcggtcccagtgccccacaccaccgcactgtcgctgcccgcctgccctgaggagtccccgctgcttgtgggccccatgctgattgagtttaacatgcctgtggacctggagctcgtggcaaagcagaacccaaatgtgaagatgggcggccgctatgcccccagggactgcgtctctcctcacaaggtggccatcatcattccattccgcaaccggcaggagcacctcaagtactggctatattatttgcacccagtcctgcagcgccagcagctggactatggcatctatgttatcaaccaggcgggagacactatattcaatcgtgctaagctcctcaatgttggctttcaagaagccttgaaggactatgactacacctgctttgtgtttagtgacgtggacctcattccaatgaatgaccataatgcgtacaggtgtttttcacagccacggcacatttccgttgcaatggataagtttggattcagcctaccttatgttcagtattttggaggtgtctctgctctaagtaaacaacagtttctaaccatcaatggatttcctaataattattggggctggggaggagaagatgatgacatttttaacagattagtttttagaggcatgtctatatctcgcccaaatgctgtggtcgggaggtgtcgcatgatccgccactcaagagacaagaaaaatgaacccaatcctcagaggtttgaccgaattgcacacacaaaggagacaatgctctctgatggtttgaactcactcacctaccaggtgctggatgtacagagatacccattgtatacccaaatcacagtggacatcgggacaccgagctagcgttttggtacacggataagagacctgaaattagccagggacctctgctgtgtgtctctgccaatctgctgggctggtccctctcatttttaccagtctgagtgacagctccccttggctcatcattcagatggctttccagatgaccaggacaggtgggatattttgcccccaacttggctcggcatgtgaattcttagctctgcaaggtgtttatgcctttgcgggtttcttgatgtgttcgcagtgtcacccaagagtcagaactgtagacatcccaaaatttggtggccgtggaacacattcccggtgatagaattgctaaattgtcgtgaaataggttagaatttttctttaaattatggttttcttattcgcgaaaattcggagagtgctgctaaaattggattggtgtcatctttttggtagttgtaatttaacagaaaaacacaaaatttcaaccattcttaatgttacgtcctccccccacccccttctttcagtggtatgcaaccactgcaatcaatgtgtcatatgtcttttcttagcaaaaggatttaaaacttgagccctggaccttttgcctatgtgtgtggattccagggcaactctagcatcagagcaaaagccttgggtttctcgcattcagtggcctatctccagattgtctgatttctgaatgtaaagttgttgtgtttttttttaaatagtaggtttgtagtattttaaagaaagaacagatcgagttctaattatgatctagcttgattttgtgttgatccaaatttgcatagctgtttaatgttaagtcatgacaatttatttttcttggcatgctatgtaaacttgaatttcctaagtatttttattctggtgttttaaatatggggaggggtattgagcattttttagggagaaaaataaatatatgctgtagtggccacaaataggcctatgatttagctggcaggccaggttttctcaagagcaaaatcaccctctggccccttggcaggtaaggcctcccggtcagcattatcctgccagacctcggggaggatacctgggagacagaagcctctgcacctactgtgcagaactctccacttccccaaccctccccaggtgggcagggcggagggagcctcagcctccttagactgacccctcaggcccctaggctggggggttgtaaataacagcagtcaggttgtttaccagccctttgcacctccccaggcagagggagcctctgttctggtgggggccacctccctcagaggctctgctagccacactccgtggcccaccctttgttaccagttcttcctccttcctcttttcccctgcctttctcattccttccttcgtctccctttttgttcctttgcctcttgcctgtcccctaaaacttgactgtggcactcagggtcaaacagactatccattccccagcatgaatgtgccttttaattagtgatctagaaagaagttcagccgcacccacaccccaactccctcccaagaacttcggtcctaaagcctcctgttccacctcaggttttcacaggtgctcacaccacagttgaggctcacacacaggtctgtctgtcacaaacccacctctgttgggagctattgagccacctgggatgagatgacacaagacactcctaccactgagcgcctttgtccaggtgccagcctgggctcaggttccaagactcagctgcctaatcccagggttgagccttgtgctcgtgtcggaccccaaaccactgccctcctggtaccagccctcagtgtggaggctgagctggtgcctggccccagtcttatctgtgcctttactgctttgcgcatctcagatgctaacttggttctttttccagaaggctttgtattggttaaaaattattttctattgcagagagcagctgtgactcatgcaaaaagtattttctctgtcagatccccactctataccaaggatattattaaaactagaaatgactgcattgagagggagttgtgggaaataagaagaatgaaagcctctctttctgtccgcagatcctgacttttccaaagtgccttaaaagaaatcagacaaatgccctgagtggtaacttctgtgttattttactcttaaaaccaaactctaccttttcttgtttttttttttttttttttttttttttttggttaccttctcattcatgtcaagtatgtggttcattcttagaaccaagggaaatactgctccccccatttgctgacgtagtgctctcatgggctcacctgggcccaaggcacagccagggcacagttaggcctggatgtttgcctggtccgtgagatgccgcgggtcctgtttccttactggggatttcagggctgggggttcagggagcatttccttttcctgggagttatgtaccgcgaagtgtgtcatgtgccgtgcccttttctgtttctgtgtatcctattgctggtgactctgtgtgaactggcctttgggaaagatcagagaggcagaggtggcacaggacagtaaaggagatgctgtgctgcctacagcctggacagggtctctgctgtactgccaggggcgggggctctgcatagccaggatgacgcctttcatgtcccagagacctgttgtgctgtgtattttgatttcctgtgtatgcaaatgtgtgtatttaccattgtgtagggggctgtgtctgatcttggtgttcaaaacagaactgtatttttgcctttaaaattaaataatataacgtgaataaatgaccctaactttgt

SEQ ID NO: 26 - DNA, 2227 bp, Homo sapiens
cgcgcgggccgggcctgcccctccgaggcgccgtagcgcgggagggaggcggcggcgctgtggtccgtgggtccgccggtccgtgggtctgcccggccgcccggccccgccctgccccccggggcggctcggctccatggcccgcggcggcggcggcggcggcggcggcgggaggcgacccgggggccgcggtggccgctgaccgggcggcgggaggcggcggggccgggccatgggggacggaaccgtccgcagccgccggagccgggagccctgcccaagtcggagcggcgtcccctgctgagccccgagcgccgggccagcagccggatgcccgggcccactgggcgggccagtggccgcctgcgggatgagcagactgctgggggggacgctggagcgcgtctgcaaggctgtgctccttctctgcctgctgcacttcctcgtggccgtcatcctctactttgacgtctacgcccagcacctggccttcttcagccgcttcagtgcccgaggccctgcccatgccctccacccagctgctagcagcagcagcagcagcagcaactgctcccggcccaacgccaccgcctctagctccgggctccctgaggtccccagtgccctgcccggtcccacggctcccacgctgccaccctgtcctgactcgccacctggtcttgtgggcagactgctgatcgagttcacctcacccatgcccctggagcgggtgcagagggagaacccaggcgtgctcatgggcggccgatacacaccgcccgactgcaccccagcccagacggtggcggtcatcatcccctttagacaccgggaacaccacctgcgctactggctccactatctacaccccatcttgaggcggcagcggctgcgctacggcgtctatgtcatcaaccagcatggtgaggacaccttcaaccgggccaagctgcttaacgtgggcttcctagaggcgctgaaggaggatgccgcctatgactgcttcatcttcagcgatgtggacctggtccccatggatgaccgcaacctataccgctgcggcgaccaaccccgccactttgccattgccatggacaagtttggcttccggcttccctatgctggctactttggaggtgtgtcaggcctgagtaaggctcagtttctgagaatcaatggcttccccaatgagtactggggctggggtggcgaggatgatgacatcttcaaccggatctccctgactgggatgaagatctcacgcccagacatccgaatcggccgctaccgcatgatcaagcacgaccgcgacaagcataacgaacctaaccctcagaggtttaccaagattcaaaacacgaagctgaccatgaagcgggacggcattgggtcagtgcggtaccaggtcttggaggtgtctcggcaaccactcttcaccaatatcacagtggacattgggcggcctccgtcgtggccccctcggggctgacactaatggacagaggctctcggtgccgaagattgcctgccagaggactgaccacagcctggctggcagctgctctgtggaggacctccaggactgagactgggctctgttttccaagggtcttcactaggccccctagctacacctggaagtttcagaacccactttggggggcctcctgcctgggcaggctcttcaagtgtggccctctttggagtcaaccctccttcccgaccccctccccctagcccagccccagtcactgtcagggtcgggccagcccctgcactgcctcgcagagtggcctgggctaggtcactccacctctctgtgcctcagtttcccccccttgagtcccctagggcctggaagggtgggaggtatgtctagggggcagtgtctcttccagggggaattctcagctcttgggaacccccttgctcccaggggaggggaaacctttttcattcaacattgtagggggcaagctttggtgcgccccctgctgaggagcagccccaggaggggaccagaggggatgctgtgtcgctgcctgggatcttggggttggcctttgcatgggaggcaggtggggcttggatcagtaagtctggttcccgcctccctgtctgagagaggaggcaggagccccagggccggcttgtgtttgtacattgcacagaaacttgtgtgggtgctttagtaaaaaacgtgaatggaaaaaaaaaaaaaaaaaaa

SEQ ID NO: 27 - DNA, 1949 bp, Homo sapiens
atgacgcgagaccccgcccccgcagcgcccgcttccaagatggcggcagcgatgcctgcccggctgttggggtggcggtgacgacaggcagcaaaagaccagctggtcccagattcgctgctggagtgctggatggagcctttctctgccctctgtgacatttccaattttagataatgcctcacatctctgtccccccgggaccccctggagcccccatgatccctaagaagacagcttgaacctagatctcacccccaggatgttgcggaggctgctggagcggccttgcacgctggccctgcttgtgggctcccagctggctgtcatgatgtacctgtcactggggggcttccgaagtctcagtgccctatttggccgagatcagggaccgacatttgactattctcaccctcgtgatgtctacagtaacctcagtcacctgcctggggccccagggggtcctccagctcctcaaggtctgccctactgtccagaacgatctcctctcttagtgggtcctgtgtcggtgtcctttagcccagtgccatcactggcagagattgtggagcggaatccccgggtagaaccagggggccggtaccgccctgcaggttgtgagccccgctcccgaacagccatcattgtgcctcatcgtgcccgggagcaccacctgcgcctgctgctctaccacctgcaccccttcttgcagcgccagcagcttgcttatggcatctatgtcatccaccaggctggaaatggaacatttaacagggcaaaactgttgaacgttggggtgcgagaggccctgcgtgatgaagagtgggactgcctgttcttgcacgatgtggacctcttgccagaaaatgaccacaatctgtatgtgtgtgacccccggggaccccgccatgttgccgttgctatgaacaagtttggatacagcctcccgtacccccagtacttcggaggagtctcagcacttactcctgaccagtacctgaagatgaatggcttccccaatgaatactggggctggggtggtgaggatgacgacattgctaccagggtgcgcctggctgggatgaagatctctcggccccccacatctgtaggacactataagatggtgaagcaccgaggagataagggcaatgaggaaaatccccacagatttgacctcctggtccgtacccagaattcctggacgcaagatgggatgaactcactgacataccagttgctggctcgagagctggggcctctttataccaacatcacagcagacattgggactgaccctcggggtcctcgggctccttctgggccacgttacccacctggttcctcccaagccttccgtcaagagatgctgcaacgccggcccccagccaggcctgggcctctatctactgccaaccacacagccctccgaggttcacactgactcctccttcctgtctaccttaatcatgaaaccgaattcatggggttgtattctccccaccctcagctcctcactgttctcagagggatgtgagggaactgaactctggtgccgtgctagggggtaggggcctctccctcactgctggactggagctgggctcctgtagacctgaggggtccctctctctagggtctcctgtagggcttatgactgtgaatccttgatgtcatgattttatgtgacgattcctaggagtccctgcccctagagtaggagcagggctggaccccaagcccctccctcttccatggagagaagagtgatctggcttctcctcggacctctgtgaatatttattctatttatggttcccgggaagttgtttggtgaaggaagcccctccctgggcattttctgcctatgctggaatagctccctcttctggtcctggctcagggggctgggattttgatatattttctaataaaggactttgtctcgc

SEQ ID NO: 28 - DNA, 2283 bp, Homo sapiens
tttccgcgttctcccctctccgcgggcagtgctagctcgccgcggccgcctccggggaccacctggcttcatgtgtggatttccacggctcttgcccagaggcgggtacactgtgttccaatgtgccacggaactcacgcagtggcactttgtggcttcatgaaggaagaggcaggccacgcaacacttcctccccaagccaaggagaagtatcacttttagaggcagaggagcggaaggcagtgggtgtgaccaaaagtgccatttgttaaagactgttggagcagaactactgagaaaaaccaggcattgtatcttcagttgtcatcaagttcgcaatcagattggaaaagctcaacttgaagctttcttgcctgcagtgaagcagagagatagatattattcacgtaataaaaaacatgggcttcaacctgactttccacctttcctacaaattccgattactgttgctgttgactttgtgcctgacagtggttgggtgggccaccagtaactacttcgtgggtgccattcaagagattcctaaagcaaaggagttcatggctaatttccataagaccctcattttggggaagggaaaaactctgactaatgaagcatccacgaagaaggtagaacttgacaactgcccttctgtgtctccttacctcagaggccagagcaagctcattttcaaaccagatctcactttggaagaggtacaggcagaaaatcccaaagtgtccagaggccggtatcgccctcaggaatgtaaagctttacagagggtcgccatcctcgttccccaccggaacagagagaaacacctgatgtacctgctggaacatctgcatcccttcctgcagaggcagcagctggattatggcatctacgtcatccaccaggctgaaggtaaaaagtttaatcgagccaaactcttgaatgtgggctatctagaagccctcaaggaagaaaattgggactgctttatattccacgatgtggacctggtacccgagaatgactttaacctttacaagtgtgaggagcatcccaagcatctggtggttggcaggaacagcactgggtacaggttacgttacagtggatattttgggggtgttactgccctaagcagagagcagtttttcaaggtgaatggattctctaacaactactggggatggggaggcgaagacgatgacctcagactcagggttgagctccaaagaatgaaaatttcccggcccctgcctgaagtgggtaaatatacaatggtcttccacactagagacaaaggcaatgaggtgaacgcagaacggatgaagctcttacaccaagtgtcacgagtctggagaacagatgggttgagtagttgttcttataaattagtatctgtggaacacaatcctttatatatcaacatcacagtggatttctggtttggtgcatgaccctgggtcttttggtgatgtttggaagaactgattctttgtttgcaataattttggcctagagacttcaaatagtagcacacattaagaacctgttacagctcattgttgagctgaatttttcctttttgtattttcttagcagagctcctggtgatgtagagtataaaacagttgtaacaagacagctttcttagtcattttgatcatgagggttaaatattgtaatatggatacttgaaggactttatataaaaggatgactcaaaggataaaatgaacgctatttgaggactctggttgaaggagatttatttaaatttgaagtaatatattatgggataaaaggccacaggaaataagactgctgaatgtctgagagaaccagagttgttctcgtccaaggtagaaaggtacgaagatacaatactgttattcatttatcctgtacaatcatctgtgaagtggtggtgtcaggtgagaaggcgtccacaaaagaggggagaaaaggcgacgaatcaggacacagtgaacttgggaatgaagaggtagcaggagggtggagtgtcggctgcaaaggcagcagtagctgagctggttgcagctgctgatagccttcaggggaggacctgcccaggtatgccttccagtgatgcccaccagagaatacattctctattagtttttaaagagtttttgtaaaatgattttgtacaagtaggatatgaattagcagtttacaagtttacatattaactaataataaatatgtctatcaaatacctctgtagtaaaatgtgaaaaagcaaaaaaaaaaaaaaaaaaaaaa

SEQ ID NO: 29 - DNA, 4646 bp, Homo sapiens
gggaggcggtggccgaggcccaggcggtggcggcggcggcccaggaggcggcggacggggagctgcgggagcaggcccgggcctggctctctagcggccgcctggctgcagcatgcgcgcccgccgggggctgctgcggctgccgcgccgctcgctgctcgccgcgctcttcttcttttctctctcgtcctcgctgctgtacttcgtctatgtggcgcccggcatagtgaacacctacctcttcatgatgcaagcccaaggcattctgatccgggacaacgtgagaacaatcggtgctcaggtttatgagcaggtgcttcggagtgcttatgccaagaggaacagcagtgtaaatgactcagattatcctcttgacttgaaccacagtgaaaccttcctgcaaactacaacatttcttcctgaagacttcacctactttgcaaaccatacctgccctgaaagactcccttccatgaagggcccaatagacataaacatgagtgaaattggaatggattacattcatgaactcttctccaaagacccaaccatcaagctcggaggtcactggaagccttctgattgcatgcctcggtggaaggtggcgatccttatccccttccggaaccgccacgagcacctcccagtcctgttcagacacctgcttcccatgctccagcgccagcgcttgcagtttgcattttatgtggttgaacaagttggtacccaaccctttaatcgagccatgcttttcaacgttggctttcaagaggcaatgaaagacttggattgggactgtttgatttttcatgatgtagatcacataccggaaagtgatcgcaactattatggatgtggacagatgccgaggcattttgcaaccaaattggataagtatatgtatctgcttccttataccgagttctttggcggagtgagtggcttaacagtggaacaatttcggaaaatcaatggctttcctaatgctttctggggttggggtggagaagatgacgacctctggaacagagtacagaatgcaggctattctgtgagccggccagagggtgacacaggaaagtacaagtccattcctcatcaccatcgaggagaagtccagtttcttggaaggtatgctctgctgaggaagtcaaaagaacggcaagggctggatggcctcaacaacctgaactactttgcaaacatcacatacgacgccttgtataaaaacataactgtcaacctgacacccgagctggctcaggtgaacgagtactgagaggagagaatgtacgtttgctttacccaccgccaccaagaaagcagtccgatgagatttttttttggaggggggagggtctacacagcaagagaacagaaatactgtgtctcatgaaggatcacagagttcagggggaaaatgtgacagcacacgcacaaacgccttcactggatcagccgctggaactgagggagtgagcttggggacttccttcgtcagcactggctttctgttttcacaagacagacgtctgtcccgctgctctctccccatctcctaccccacatcctgtcttagccgcagtctccagaacccatgatgaactgtgatctgccgtggtcctgccgtggtcctgccgtggagcctgtccctacacatgaccttggagcctcttggccttcagagcagaggcaaacccaccacagggcagctgcgttttaggaagagcaaatgaaactccacaccattcttctagatctctggtgttctctttggtttcatttttttaaaaaattaccttctttgggtggggattgagggtggaggggagggtgtttgggaaagataaatagacataaatatataacaatcacttcttgaagaagtataattgtaaataagccatgtaaaatgcctttttaaaatttaattttctagctggctccaattcaaattgaggatttatgtattaggccacttacttggttggcaagtgcaggaactcagttaaaatgcagttgaagaatgtcatctcccgaattgctgtcactttggcgagggagtggatatagggcatgtcacaaaagaacaaaataacccgacctttattgctgggagctggcttctgtccctttcttcccccccccacgagtcttgcccttgacttctgctctggattcactcttccctgtcggccgcgcatgtgctcatcccactctccgctaagcgggaggctgctgttagagcaggctgcttcctgcctaaagcaggcccttcggggctcgctgcacacacatctctggctctccaggcttcgtgttctgtcttttcatcagcatggcggggcggggggcggggggcgggggtgtgtatgggaatccctccccctcttactttttctcttgtggaacttggccacagtttctgaacaatgtgcctacattaccagctggcttcagtgattcctctgtgtccctttttggtttctggaaagattctttgtcaacattagtaactgatacatagaaccaaggagcactcaaatagggagccaggagccagggagctggtgacacttgtgtgctgtggggcagctgggatccaggtaagaccggattgaagctttgaaattagactaacaaagctccagacagcaagagcccaggtgcactgctcacacccccacctgcattttgaagtcatattattttttgttttgttttttaagacggtctggctctgtcgcctaagctggagtgtggtggcacgatcacagctcactgcagcctccatctcctaggctcaagccattttcccacctcagcctcccgagtagctgggactacaggtgcacaccaccacacctggctaattttttgtatttttagtagagacaggggtttcttccatgttgcccaggctggtctcgaactcctggactcaagcaatccgcccaccttgacttcccaaagtgctgggattatgggcgggtgtgagccattgcgcccagccttgaagtcatgttctaaattgtatttgaatttgtgcctctttgtttttccccaaaccaaagccctcaaattgtagtctctgtcggcttctgcagaattctggaaaatgccagttttcctcccccgcccttgttttccataaaacatatttatatattgtgatgaggagtactttctgaagagtacttcgtatttttttttaattgccttgtttgccttcaacttccttgattttcatagtttacatgggtgtgtgtaggggtgtgtgtgtgtatgtgtgtgggttagggcttttttcgttgcatgtgatggttctgtggacatatgatccccacaaactgtgggagtgattggccaggccttgttttgtttgtttgtttgtttgtgtttttgttcttttgaagaatagagtggtatttagaaaataaattgcattgcaaagctcttatcggctcatatgagagagcaggttcctgcccttgaaaatgccggtaagctatagcatatgttttttaagacttaagcatttcatgctttaaaataccttcacaagtgaacattacacacagaagttcatttggttttcctttgttttatggtgcatatagcaataaagacccccctccaccctgcaacccccatcccccaccgggcctttgtccctgccttggcttttctccccttctcattctcctctcccctttcctcactgaaggctgtgagttgctttcaatgtgacaacactatgatgtcatttggaaggatttgccaggacagactgattctgagtcctgggtgccgtatgtgtatgcggcagtgttgtcaggcgatcttgtttgaagctctatgttgccataattaccatcaagtacacactgttggcaaaaggctaacacctgactttagaaaatgctgatttgagaacaaaaggaaaggtcttttttcactgcttaaagtggggtcactttgatacctttgcggtcatgtctgtgtctgatgagtgtagaatctctggatgtgcactgtcagtcatgtgtccaccaggcctcgaatatcatatgggaaatgtcatagttaaaaacgtacagccaggcccgtgtgctgttaatagtgtgaaattgtcatgttaaaaaaaaaaacaggaaccaaatgtgaccttgtgcatatattggtagctgaaaatcttcaaggctactgatgggtggccccttaatcttgtctttgattgctgtgtgcagggaaaggtgtccccgtttgttcatgctgttttggggggtgggggggtatttgcaagaatactcattttgacataataggtcctcttgtcagagatcctctaccacagacattaatagctgagcaggagccacatggattgattgtatccactcaccattgacgatggcattgagcgtagctagcttatttccatcactacgtgtttttgagcttgctcttacgttttaagaggtgccaggggtacatttttgcactgaaatctaaagatgttttaaaaaacacttttcacaaaaatagtcctttgtcattacattatttactcatgtgtttgtacatttttgtatgttaatttatgaatgattttttcagtaaaaaatacatattcaagaaccaaa

SEQ ID NO: 30 - DNA, 3830 bp, Homo sapiens
tccacctcttgtccctcggcctccgcgcctcccctcccccgactctctggcctcccattcattccgtccgctccctcccatttcctcttttccgctcgggccctctccccagagcctccccgcgcggaccccgctgcagtgtcggggttctcagcacatttatggaagtttagggcctggacagtggccccgagtccggcctgagagcgcagcctgggctgctggcagggaagaggaagatgtctgtgctcaggcggatgatgcgggtttccaatcgctctctcctcgccttcatcttctttttctccctctcttcgtcctgtctgtacttcatctatgtggccccaggcatcgccaacacatatctctttatggtacaagctcgaggtataatgttgagagaaaatgtgaaaacaataggtcatatgatcaggctgtacacaaataaaaacagtacgctcaacggtacagattatcccgaaggcaataattcaagtgattatcttgttcaaacaacaacgtatctcccggaaaacttcacatactcaccatacctcccctgtccagaaaagctgccttatatgcgaggattcctcaatgtcaatgtaagcgaagtcagttttgatgaaattcatcaactcttctccaaggatttagatattgagccagggggtcattggaggccaaaagactgtaaacccagatggaaggtggcagttctcattcctttccgtaatcgccatgaacatcttccaatttttttcttacatctgattccaatgctccagaagcagcggctggaatttgcgttttatgtcgttgaacagactggcacacaaccttttaaccgtgcgatgcttttcaatgtgggcttcaaagaggccatgaaagacagtgtctgggactgtgtaatcttccacgatgtggatcatctacctgaaaatgaccggaactattacggatgtggagaaatgccacgtcattttgctgcaaagctggataaatacatgtatattcttccatataaagaattttttggtggtgtaagtgggctgacagtggaacaatttagaaagatcaatggttttcctaatgccttctggggatggggaggagaagatgatgacctttggaacagagttcactatgctggatataatgtaaccagaccagagggagacttaggaaaatacaagtcaattcctcatcaccatagaggtgaagtccagtttttaggacggtataaattactaaggtattccaaggagcgtcagtacatcgatggactgaacaatttaatatataggccaaaaatactggttgataggttgtatacaaacatatctgtaaacctcatgccagagttagctccaatcgaagactattaaaagaagtggctgtcgtggcaaggtagaccacaatgctggatcataaacttggagcgcgctcttagtggaggtcagtgattggctgtgtcacagtgcccttttctctgagaagagccagcagtccacagtgtttacagagtgggactatatacagtcacccttctctcacccgtcctccctgctctgagacacacccctgtggcgagcaccgcagaaatgggaagccactacttaagatcggaagttaagagagctccctccgaagagaaaatttttatactaaaatctataatttaattcaagagaatgcttttatttccgtttaaacatattttgtatatatgtgatataaattaatgtgtgcaaattgtttaaaaattagatgtgttgcagttttgcatgtaatcggttatacctttattggacttttatagacattttttatttgcatgaaaaaaactcactaaatttacatcactaaacaaaggttaacccttgtgtgaaatgaaggaactgtcaataattgacagccaactaatacagtaaactgttatactagttttgagctttagacctcagccttttgtgtggaagaagtcacagctttcttaggctttaaaggaaaagaaggaaggacttaaatagcttttcttcctaccgggattacctatgtttttccttgcttgcaatctcatctgattttgctagaaatcacaaccatattgtttatgcatattgcatgagtattaccaagaaaaatcttaaaagttgtgatgtgacatgatataaaggatctctttatgttaaatgtctttccatgtacctctggtgtgtcagggattttgtgcctcaaaaaatgtttccaaggttgtgtgtttatactgtgtattttttttaaattcacggtgaacagcacttttattatttccagttcagaagagccaaaaaaaagtatcttcatttaaaaagaaatcaagtcagtttttttaaaagaatgatctatggaagaaaacccaatagtacttataatatacaaatgaattatactattagataagaattaaatattctatttttataaagataaatacttagtagataaaaacaaattttaagtttagttttcagacatagaatttcacttttggaggggacccttgaatgttagtttcattcaaactatattttgtttttttcacttttaagagattatatctctggtgttaattactaaaattttctttctaaaagtataatttaatagaattatcttaaaatacatgatcagtattcagtgcgctgatattataatgtcttctatatgtagtatctaaaagcataatttaatagcattgtcttaaaatacatgatgagttatttggtgcactgatgccataatgtcttctatatgtaatatcttacatgtttgcatgagtgtcagggctttgtccagttatcttcatatgactgttctctgagaaaaggtcttactacctgatatcaagtacatatcttaattttggatgaatttttccacagtaaagccgaacagtattcttttttgaaaattagcaattataaagattgtttaaaatatcttgatattttcacaaattttaaacaaaaaattaaatatctataaagtgaatgttcaacaacaatgatgagcaatagaaatctatatatgagaaacgtttggataatatttgcctcaaggattgtttacctaaaacagaactatggttatttatctcagattgtaagttttattttgaagtgtcatttttatggcaatattgataacacaaatgaccacaaactaaatcataaaataattgaatccttactttgagaaaatggatagcttctgtgttatgataccaaacaaaatattttcatatttatttcttagaactatttccaaaatatttatatttcagtttttttatggtactcgaaaaatcaaaccttctgaaaattatgatatttgtacttcatttgtgtattagttcattttctgtttctattacatagtttttaaagtcaatgaaagagattgagaatgttaacatttgttgatcaatgtggagctgtccacattcggtatcttttcatttttatatatattttacagtttcaagaaaacttagtactactagtatctgccttattttcttaagtctgatgttaatttttgtttcaggagtgagatataaacattttgctttttttcagttttgaaatatagtttgtcatcctgtgaaaaccacctcgtttgctttttgtttgtttgttttgcttttttagtgtagacctaaaattatttttgcctataaacagtgaacttaatatgtttctgtgagagtgacagagctgtgcccgtttatcttcattgtattaattattacataaagattaacaaatacattgcaaatgcaaatt

SEQ ID NO: 31 - DNA, 1669 bp, Homo sapiens
ctgcgagcgcctgccccatgcgccgccgcctctccgcacgatgttcccctcgcggaggaaagcggcgcagctgccctgggaggacggcaggtccgggttgctctccggcggcctccctcggaagtgttccgtcttccacctgttcgtggcctgcctctcgctgggcttcttctccctactctggctgcagctcagctgctctggggacgtggcccgggcagtcaggggacaagggcaggagacctcgggccctccccgcgcctgccccccagagccgccccctgagcactgggaagaagacgcatcctggggcccccaccgcctggcagtgctggtgcccttccgcgaacgcttcgaggagctcctggtcttcgtgccccacatgcgccgcttcctgagcaggaagaagatccggcaccacatctacgtgctcaaccaggtggaccacttcaggttcaaccgggcagcgctcatcaacgtgggcttcctggagagcagcaacagcacggactacattgccatgcacgacgttgacctgctccctctcaacgaggagctggactatggctttcctgaggctgggcccttccacgtggcctccccggagctccaccctctctaccactacaagacctatgtcggcggcatcctgctgctctccaagcagcactaccggctgtgcaatgggatgtccaaccgcttctggggctggggccgcgaggacgacgagttctaccggcgcattaagggagctgggctccagcttttccgcccctcgggaatcacaactgggtacaagacatttcgccacctgcacgacccagcctggcggaagagggaccagaagcgcatcgcagctcaaaaacaggagcagttcaaggtggacagggagggaggcctgaacactgtgaagtaccatgtggcttcccgcactgccctgtctgtgggcggggccccctgcactgtcctcaacatcatgttggactgtgacaagaccgccacaccctggtgcacattcagctgagctggatggacagtgaggaagcctgtacctacaggccatattgctcaggctcaggacaaggcctcaggtcgtgggcccagctctgacaggatgtggagtggccaggaccaagacagcaagctacgcaattgcagccacccggccgccaaggcaggcttgggctgggccaggacacgtggggtgcctgggacgctgcttgccatgcacagtgatcagagagaggctggggtgtgtcctgtccgggaccccccctgccttcctgctcaccctactctgacctccttcacgtgcccaggcctgtgggtagtggggagggctgaacaggacaacctctcatcacccccacttttgttccttcctgctgggctgcctcgtgcagagacacagtgtaggggccatgcagctggcgtaggtggcagttgggcctggtgagggttaggacttcagaaaccagagcacaagccccacagagggggaacagccagcaccgctctagctggttgttgccatgccggaatgtgggcctagtgttgccagatcttctgatttttcgaaagaaactagaatgctggattcttaagtgatatcttctgattttttaaatgatagcacctaaatgaaactttcaaaaagtaaaaaaaaaaa

SEQ ID NO: 32 - DNA, 1794 bp, Homo sapiens
tacagctttgattttataacatcctgctaatttttgttcttacagaaatacactttcgggaaatggcctctaaatcctggctgaattttttaaccttcctctgtggatcagcaataggatttcttttatgttctcagctatttagtattttgttgggagaaaaggttgacacccagcctaatgttcttcataatgatcctcatgcaaggcattcagatgataatggacagaatcatctagaaggacaaatgaacttcaatgcagattctagccaacataaagatgagaacacagacattgctgaaaacctctatcagaaagttagaattctttgctgggttatgaccggccctcaaaacctagagaaaaaggccaaacacgtcaaagctacttgggcccagcgttgtaacaaagtgttgtttatgagttcagaagaaaataaagacttccctgctgtgggactgaaaaccaaagaaggcagagatcaactatactggaaaacaattaaagcttttcagtatgttcatgaacattatttagaagatgctgattggtttttgaaagcagatgatgacacgtatgtcatactagacaatttgaggtggcttctttcaaaatacgaccctgaagaacccatttactttgggagaagatttaagccttatgtaaagcagggctacatgagtggaggagcaggatatgtactaagcaaagaagccttgaaaagatttgttgatgcatttaaaacagacaagtgtacacatagttcctccattgaagacttagcactggggagatgcatggaaattatgaatgtagaagcaggagattccagagataccattggaaaagaaacttttcatccctttgtgccagaacaccatttaattaaaggttatctacctagaacgttttggtactggaattacaactattatcctcctgtagagggtcctggttgctgctctgatcttgcagtttcttttcactatgttgattctacaaccatgtatgagttagaatacctcgtttatcatcttcgtccatatggttatttatacagatatcaacctaccttacctgaacgtatactaaaggaaattagtcaagcaaacaaaaatgaagatacaaaagtgaagttaggaaatccttgaaagaaaatcatgaatgaacaaaggtaatatgtctagcactgcactgaaaaaggacttctgcatttctgacatagaacactggaatcccagtgaggaattctaagtgaacattccttatagaaacctttcacatgaatgactataaactgaagctttaaatgagctgtgaagtgtgttaaaatgtgttttgatacagtaatatataaatatgtctatatatatgaggaacttgtgttttttaaatggtggccaggtagaggaactagaaaagagattttgttgcctgttttctgaccatctgtgttattgtcactgagaaactaaaatagtaaatttactaaaactacactgcaccatgttagtaataaacagatctgccttaaagaaaagaaaattttagaaagaaatattgttgctcagtgttgttaatatagctcaagaattgagtttatatttgcagtatgctataaatgatacccccctaccacacccacacacacagtttttgtctaatgaaaatgttgctgtgattatttataattggtagtatttcttccagaagaagctaaaataagactggcacttaccctgaagtgcattaataaaaccacactttaaaattaaaaaaaaaaaaaaaaaa

SEQ ID NO: 33 - DNA, 1838 bp, Homo sapiens
gccttcgcggcgctcgtttcctggcgctccccacctttagcgagaccaacgagagaacaccgcctgcagctagaacagcctggtcaggagcgtaacggagtggtgcgccaacgtgagaggaaacccgtgcgcggctgcgctttcctgtccccaagccgttctagacgcggatgaagtgcaaaacaaacttctccatagaggagttgttgcaaagttccagtttataccaaacagtaatcagattccattggaagctaaagattttgagagccttttgtactatatgcaactaacttgatttcaagcttgggaaccttttaaaaaaaacattaaaagcaaaatgaaaaatgctttctgaaagcagctcctttttgaagggtgtgatgcttggaagcattttctgtgctttgatcactatgctaggacacattaggattggtcatggaaatagaatgcaccaccatgagcatcatcacctacaagctcctaacaaagaagatatcttgaaaatttcagaggatgagcgcatggagctcagtaagagctttcgagtatactgtattatccttgtaaaacccaaagatgtgagtctttgggctgcagtaaaggagacttggaccaaacactgtgacaaagcagagttcttcagttctgaaaatgttaaagtgtttgagtcaattaatatggacacaaatgacatgtggttaatgatgagaaaagcttacaaatacgcctttgataagtatagagaccaatacaactggttcttccttgcacgccccactacgtttgctatcattgaaaacctaaagtattttttgttaaaaaaggatccatcacagcctttctatctaggccacactataaaatctggagaccttgaatatgtgggtatggaaggaggaattgtcttaagtgtagaatcaatgaaaagacttaacagccttctcaatatcccagaaaagtgtcctgaacagggagggatgatttggaagatatctgaagataaacagctagcagtttgcctgaaatatgctggagtatttgcagaaaatgcagaagatgctgatggaaaagatgtatttaataccaaatctgttgggctttctattaaagaggcaatgacttatcaccccaaccaggtagtagaaggctgttgttcagatatggctgttacttttaatggactgactccaaatcagatgcatgtgatgatgtatggggtataccgccttagggcatttgggcatattttcaatgatgcattggttttcttacctccaaatggttctgacaatgactgagaagtggtagaaaagcgtgaatatgatctttgtataggacgtgtgttgtcattatttgtagtagtaactacatatccaatacagctgtatgtttctttttcttttctaatttggtggcactggtataaccacacattaaagtcagtagtacatttttaaatgagggtggtttttttctttaaaacacatgaacattgtaaatgtgttggaaagaagtgttttaagaataataattttgcaaataaactattaataaatattatatgtgataaattctaaattatgaacattagaaatctgtggggcacatatttttgctgattggttaaaaaattttaacaggtctttagcgttctaagatatgcaaatgatatctctagttgtgaatttgtgattaaagtaaaacttttagctgtgtgttccctttacttctaatactgatttatgttctaagcctccccaagttccaatggatttgccttctcaaaatgtacaactaagcaactaaagaaaattaaagtgaaagttgaaaaa

SEQ ID NO: 34 - DNA, 3260 bp, Homo sapiens
ccatcccatagtgagggaagacacgcggaaacaggcttgcacccagacacgacaccatgcatctcctcggcccctggctcctgctcctggttctagaatacttggctttctctgactcaagtaaatgggtttttgagcaccctgaaaccctctacgcctgggagggggcctgcgtctggatcccctgcacctacagagccctagatggtgacctggaaagcttcatcctgttccacaatcctgagtataacaagaacacctcgaagtttgatgggacaagactctatgaaagcacaaaggatgggaaggttccttctgagcagaaaagggtgcaattcctgggagacaagaataagaactgcacactgagtatccacccggtgcacctcaatgacagtggtcagctggggctgaggatggagtccaagactgagaaatggatggaacgaatacacctcaatgtctctgaaaggccttttccacctcatatccagctccctccagaaattcaagagtcccaggaagtcactctgacctgcttgctgaatttctcctgctatgggtatccgatccaattgcagtggctcctagagggggttccaatgaggcaggctgctgtcacctcgacctccttgaccatcaagtctgtcttcacccggagcgagctcaagttctccccacagtggagtcaccatgggaagattgtgacctgccagcttcaggatgcagatgggaagttcctctccaatgacacggtgcagctgaacgtgaagcacaccccgaagttggagatcaaggtcactcccagtgatgccatagtgagggagggggactctgtgaccatgacctgcgaggtcagcagcagcaacccggagtacacgacggtatcctggctcaaggatgggacctcgctgaagaagcagaatacattcacgctaaacctgcgcgaagtgaccaaggaccagagtgggaagtactgctgtcaggtctccaatgacgtgggcccgggaaggtcggaagaagtgttcctgcaagtgcagtatgccccggaaccttccacggttcagatcctccactcaccggctgtggagggaagtcaagtcgagtttctttgcatgtcactggccaatcctcttccaacaaattacacgtggtaccacaatgggaaagaaatgcagggaaggacagaggagaaagtccacatcccaaagatcctcccctggcacgctgggacttattcctgtgtggcagaaaacattcttggtactggacagaggggcccgggagctgagctggatgtccagtatcctcccaagaaggtgaccacagtgattcaaaaccccatgccgattcgagaaggagacacagtgaccctttcctgtaactacaattccagtaaccccagtgttacccggtatgaatggaaaccccatggcgcctgggaggagccatcgcttggggtgctgaagatccaaaacgttggctgggacaacacaaccatcgcctgcgcacgttgtaatagttggtgctcgtgggcctcccctgtcgccctgaatgtccagtatgccccccgagacgtgagggtccggaaaatcaagcccctttccgagattcactctggaaactcggtcagcctccaatgtgacttctcaagcagccaccccaaagaagtccagttcttctgggagaaaaatggcaggcttctggggaaagaaagccagctgaattttgactccatctccccagaagatgctgggagttacagctgctgggtgaacaactccataggacagacagcgtccaaggcctggacacttgaagtgctgtatgcacccaggaggctgcgtgtgtccatgagcccgggggaccaagtgatggaggggaagagtgcaaccctgacctgtgagagtgacgccaaccctcccgtctcccactacacctggtttgactggaataaccaaagcctcccccaccacagccagaagctgagattggagccggtgaaggtccagcactcgggtgcctactggtgccaggggaccaacagtgtgggcaagggccgttcgcctctcagcacccttactgtctactatagcccggagaccatcggcaggcgagtggctgtgggactcgggtcctgcctcgccatcctcatcctggcaatctgtgggctcaagctccagcgacgttggaagaggacacagagccagcaggggcttcaggagaattccagcggccagagcttctttgtgaggaataaaaaggttagaagggcccccctctctgaaggcccccactccctgggatgctacaatccaatgatggaagatggcattagctacaccaccctgcgctttcccgagatgaacataccacgaactggagatgcagagtcctcagagatgcagagacctccccggacctgcgatgacacggtcacttattcagcattgcacaagcgccaagtgggcgactatgagaacgtcattccagattttccagaagatgaggggattcattactcagagctgatccagtttggggtcggggagcggcctcaggcacaagaaaatgtggactatgtgatcctcaaacattgacactggatgggctgcagcagaggcactgggggcagcgggggccagggaagtccccgagtttccccagacaccgccacatggcttcctcctgcgtgcatgtgcgcacacacacacacacacgcacacacacacacacacactcactgcggagaaccttgtgcctggctcagagccagtctttttggtgagggtaaccccaaacctccaaaactcctgcccctgttctcttccactctccttgctacccagaaatcatctaaatacctgccctgacatgcacacctcccctgccccaccagcccactggccatctccacccggagctgctgtgtcctctggatctgctcgtcattttccttcccttctccatctctctggccctctacccctgatctgacatccccactcacgaatattatgcccagtttctgcctctgagggaaagcccagaaaaggacagaaacgaagtagaaaggggcccagtcctggcctggcttctcctttggaagtgaggcattgcacggggagacgtacgtatcagcggccccttgactctggggactccgggtttgagatggacacactggtgtggattaacctgccagggagacagagctcacaataaaaatggctcagatgccacttcaaagaaaaaaaaaa

SEQ ID NO: 35 - DNA, 1466 bp, Homo sapiens
tctgctcacacaggaagccctggaagctgcttcctcagacatgccgctgctgctactgctgcccctgctgtgggcaggggccctggctatggatccaaatttctggctgcaagtgcaggagtcagtgacggtacaggagggtttgtgcgtcctcgtgccctgcactttcttccatcccataccctactacgacaagaactccccagttcatggttactggttccgggaaggagccattatatccagggactctccagtggccacaaacaagctagatcaagaagtacaggaggagactcagggcagattccgcctccttggggatcccagtaggaacaactgctccctgagcatcgtagacgccaggaggagggataatggttcatacttctttcggatggagagaggaagtaccaaatacagttacaaatctccccagctctctgtgcatgtgacagacttgacccacaggcccaaaatcctcatccctggcactctagaacccggccactccaaaaacctgacctgctctgtgtcctgggcctgtgagcagggaacacccccgatcttctcctggttgtcagctgcccccacctccctgggccccaggactactcactcctcggtgctcataatcaccccacggccccaggaccacggcaccaacctgacctgtcaggtgaagttcgctggagctggtgtgactacggagagaaccatccagctcaacgtcacctatgttccacagaacccaacaactggtatctttccaggagatggctcagggaaacaagagaccagagcaggagtggttcatggggccattggaggagctggtgttacagccctgctcgctctttgtctctgcctcatcttcttcatagtgaagacccacaggaggaaagcagccaggacagcagtgggcaggaatgacacccaccctaccacagggtcagcctccccgaaacaccagaagaagtccaagttacatggccccactgaaacctcaagctgttcaggtgccgcccctactgtggagatggatgaggagctgcattatgcttccctcaactttcatgggatgaatccttccaaggacacctccaccgaatactcagaggtcaggacccagtgaggaacccacaagagcatcaggctcagctagaagatccacatcctctacaggtcggggaccaaaggctgattcttggagatttaacaccccacaggcaatgggtttatagacattatgtgagtttcctgctatattaacatcatcttagactttgcaagcagagagtcgtggaatcaaatctgtgctctttcatttgctaagtgtatgatgtcacacaagctccttaaccttccatgtctccattttcttctctgtgaagtaggtataagaagtcctatctcatagggatgctgtgagcattaaataaaggtacacatggaaaacaccagtc

SEQ ID NO: 36 - DNA, 1702 bp, Homo sapiens
agactcaacaagagctccagcaaagactttcactgtagcttgacttgacctgagattaactagggaatcttgagaataaagatgagctctgaaaattgtttcgtagcagagaacagctctttgcatccggagagtggacaagaaaatgatgccaccagtccccatttctcaacacgtcatgaagggtccttccaagttcctgtcctgtgtgctgtaatgaatgtggtcttcatcaccattttaatcatagctctcattgccttatcagtgggccaatacaattgtccaggccaatacacattctcaatgccatcagacagccatgtttcttcatgctctgaggactgggttggctaccagaggaaatgctactttatttctactgtgaagaggagctggacttcagcccaaaatgcttgttctgaacatggtgctactcttgctgtcattgattctgaaaaggacatgaactttctaaaacgatacgcaggtagagaggaacactgggttggactgaaaaaggaacctggtcacccatggaagtggtcaaatggcaaagaatttaacaactggttcaacgttacagggtctgacaagtgtgtttttctgaaaaacacagaggtcagcagcatggaatgtgagaagaatttatactggatatgtaacaaaccttacaaataataaggaaacatgttcacttattgactattatagaatggaactcaaggaaatctgtgtcagtggatgctgctctgtggtccgaagtcttccatagagactttgtgaaaaaaaattttatagtgtcttgggaattttcttccaaacagaactatggaaaaaaaggaagaaattccaggaaaatctgcactgtgggcttttattgccatgagctagaagcatcacaggttgaccaataaccatgcccaagaatgagaagaatgactatgcaacctttggatgcactttatattattttgaatccagaaataatgaaataactaggcgtggacttactatttattgctgaatgactaccaacagtgagagcccttcatgcatttgcactactggaaggagttagatgttggtactagatactgaatgtaaacaaaggaattatggctggtaacataggtttttagtctaattgaatcccttaaactcagggagcatttataaatggacaaatgcttatgaaactaagatttgtaatatttctctctttttagagaaatttgccaatttactttgttatttttccccaaaaagaatgggatgatcgtgtatttatttttttacttcctcagctgtagacaggtccttttcgatggtacatatttctttgcctttataatcttttatacagtgtcttacagagaaaagacataagcaaagactatgaggaatatttgcaagacatagaatagtgttggaaaatgtgcaatatgtgatgtggcaaatctctattaggaaatattctgtaatcttcagacctagaataatactagtcttataataggtttgtgactttcctaaatcaattctattacgtgcaatacttcaatacttcatttaaaatatttttatgtgcaataaaatgtatttgtttgtattttgtgttcagtacaattataagctgtttttatatatgtgaaataaaagtagaataaacacaaaaaaaaaaaaaaaaaaaaaaaaaaaa

SEQ ID NO: 37 - DNA, 2500 bp, Homo sapiens
atacaggaagtgacgatacttttggcgcgcgcggttgctgtttcttctctggctccgggaccggcggcggcggcggcggcacgggcggcggcgtagggtgttttaactcaaatgggtgatgaaaaggactcttggaaagtgaaaactttagatgaaattcttcaggaaaagaaacgaaggaaggaacaagaggagaaagcagagataaaacgcttaaaaaataacaacgcttcttcggtgaagttcttttgtacttccaaatgtcgcagtctgatgaccgggattccaagcgggattcccttgaggagggggagctgagagatcaccgcatggagatcacaataaggaactccccgtatagaagagaagactctatggaagacagaggagaagaagatgattctttggccatcaaaccaccccagcaaatgtctcggaaagaaaaagttcatcacagaaaagatgaaaagagaaaagagaaaaagcatgctagagtgaaagaaaaagaaagagagcacgaacgtcggaaacgacatcgagaagaacaggataaagctcgccgggaatgggaaagacagaagagaagggaaatggcaagggagcattccaggagagaaagggaccgcttggagcagttagaaaggaagcgggagcgggagcgcaagatgcgggagcagcagaaggagcagcgggagcagaaggagcgcgagcggcgggcggaggagcggcgcaaggagcgggaggcccgcagggaagtgtctgcacatcaccgaacgatgagagaggactacagcgacaaagtgaaagccagccactggagtcgcagcccgcctcggccgccgcgggagcggttcgagttgggagacggccggaagccagtaaaagaagagaaaatggaagaaagggacctgctgtccgacttacaggacatcagcgacagcgagaggaagaccagctcggccgagtcctcgtcagcagaatcaggctcaggttctgaggaagaagaggaggaggaggaagaggaggaggaggaagggagcaccagtgaagaatcagaggaggaggaggaggaagaggaagaggaggaggaggagaccggcagcaactctgaggaggcatcagagcagtctgccgaagaagtaagtgaggaagaaatgagtgaagatgaagaacgagaaaatgaaaaccacctcttggttgttccagagtcacggttcgaccgagattccggggagagtgaagaagcagaggaagaagtgggtgagggaacgccgcagagcagcgccctgacagagggcgactatgtgcccgactcccctgccctgtcgcccatcgagctcaagcaggagctgcccaagtacctgccggccctgcagggctgccggagcgtcgaggagttccagtgcctgaacaggatcgaggagggcacctatggagtggtctacagagcaaaagacaagaaaacagatgaaattgtggctctaaagcggctgaagatggagaaggagaaggagggcttcccgatcacgtcgctgagggagatcaacaccatcctcaaggcccagcatcccaacatcgtcaccgttagagagattgtggtgggcagcaacatggacaagatctacatcgtgatgaactatgtggagcacgacctcaagagcctgatggagaccatgaaacagcccttcctgccaggggaggtgaagaccctgatgatccagctgctgcgtggggtgaaacacctgcacgacaactggatcctgcaccgtgacctcaagacgtccaacctgctgctgagccacgccggcatcctcaaggtgggtgacttcgggctggcgcgggagtacggatcccctctgaaggcctacaccccggtcgtggtgaccctgtggtaccgcgccccagagctgctgcttggtgccaaggaatactccacggccgtggacatgtggtcagtgggttgcatcttcggggagctgctgactcagaagcctctgttccccgggaagtcagaaatcgatcagatcaacaaggtgttcaaggatctggggacccctagtgagaaaatctggcccggctacagcgagctcccagcagtcaagaagatgaccttcagcgagcacccctacaacaacctccgcaagcgcttcggggctctgctctcagaccagggcttcgacctcatgaacaagttcctgacctacttccccgggaggaggatcagcgctgaggacggcctcaagcatgagtatttccgcgagacccccctccccatcgacccctccatgttccccacgtggcccgccaagagcgagcagcagcgtgtgaagcggggcaccagcccgaggccccctgagggaggcctgggctacagccagctgggtgacgacgacctgaaggagacgggcttccaccttaccaccacgaaccagggggcctctgccgcgggccccggcttcagcctcaagttctgaaggtcagagtggaccccgtcatgggg

SEQ ID NO: 38 - DNA, 2500 bp, Homo sapiens; identical to SEQ ID NO: 37

SEQ ID NO: 39 - DNA, 3697 bp, Homo sapiens
agggagtgttcccgggggagatactccagtcgtagcaagagtctcgaccactgaatggaagaaaaggacttttaaccaccattttgtgacttacagaaaggaatttgaataaagaaaactatgatacttcaggcccatcttcactccctgtgtcttcttatgctttatttggcaactggatatggccaagaggggaagtttagtggacccctgaaacccatgacattttctatttatgaaggccaagaaccgagtcaaattatattccagtttaaggccaatcctcctgctgtgacttttgaactaactggggagacagacaacatatttgtgatagaacgggagggacttctgtattacaacagagccttggacagggaaacaagatctactcacaatctccaggttgcagccctggacgctaatggaattatagtggagggtccagtccctatcaccatagaagtgaaggacatcaacgacaatcgacccacgtttctccagtcaaagtacgaaggctcagtaaggcagaactctcgcccaggaaagcccttcttgtatgtcaatgccacagacctggatgatccggccactcccaatggccagctttattaccagattgtcatccagcttcccatgatcaacaatgtcatgtactttcagatcaacaacaaaacgggagccatctctcttacccgagagggatctcaggaattgaatcctgctaagaatccttcctataatctggtgatctcagtgaaggacatgggaggccagagtgagaattccttcagtgataccacatctgtggatatcatagtgacagagaatatttggaaagcaccaaaacctgtggagatggtggaaaactcaactgatcctcaccccatcaaaatcactcaggtgcggtggaatgatcccggtgcacaatattccttagttgacaaagagaagctgccaagattcccattttcaattgaccaggaaggagatatttacgtgactcagcccttggaccgagaagaaaaggatgcatatgttttttatgcagttgcaaaggatgagtacggaaaaccactttcatatccgctggaaattcatgtaaaagttaaagatattaatgataatccacctacatgtccgtcaccagtaaccgtatttgaggtccaggagaatgaacgactgggtaacagtatcgggacccttactgcacatgacagggatgaagaaaatactgccaacagttttctaaactacaggattgtggagcaaactcccaaacttcccatggatggactcttcctaatccaaacctatgctggaatgttacagttagctaaacagtccttgaagaagcaagatactcctcagtacaacttaacgatagaggtgtctgacaaagatttcaagaccctttgttttgtgcaaatcaacgttattgatatcaatgatcagatccccatctttgaaaaatcagattatggaaacctgactcttgctgaagacacaaacattgggtccaccatcttaaccatccaggccactgatgctgatgagccatttactgggagttctaaaattctgtatcatatcataaagggagacagtgagggacgcctgggggttgacacagatccccataccaacaccggatatgtcataattaaaaagcctcttgattttgaaacagcagctgtttccaacattgtgttcaaagcagaaaatcctgagcctctagtgtttggtgtgaagtacaatgcaagttcttttgccaagttcacgcttattgtgacagatgtgaatgaagcacctcaattttcccaacacgtattccaagcgaaagtcagtgaggatgtagctataggcactaaagtgggcaatgtgactgccaaggatccagaaggtctggacataagctattcactgaggggagacacaagaggttggcttaaaattgaccacgtgactggtgagatctttagtgtggctccattggacagagaagccggaagtccatatcgggtacaagtggtggccacagaagtaggggggtcttccttgagctctgtgtcagagttccacctgatccttatggatgtgaatgacaaccctcccaggctagccaaggactacacgggcttgttcttctgccatcccctcagtgcacctggaagtctcattttcgaggctactgatgatgatcagcacttatttcggggtccccattttacattttccctcggcagtggaagcttacaaaacgactgggaagtttccaaaatcaatggtactcatgcccgactgtctaccaggcacacagagtttgaggagagggagtatgtcgtcttgatccgcatcaatgatgggggtcggccacccttggaaggcattgtttctttaccagttacattctgcagttgtgtggaaggaagttgtttccggccagcaggtcaccagactgggatacccactgtgggcatggcagttggtatactgctgaccacccttctggtgattggtataattttagcagttgtgtttatccgcataaagaaggataaaggcaaagataatgttgaaagtgctcaagcatctgaagtcaaacctctgagaagctgaatttgaaaaggaatgtttgaatttatatagcaagtgctatttcagcaacaaccatctcatcctattacttttcatctaacgtgcattataattttttaaacagatattccctcttgtcctttaatatttgctaaatatttcttttttgaggtggagtcttgctctgtcgcccaggctggagtacagtggtgtgatcccagctcactgcaacctccgcctcctgggttcacatgattctcctgcctcagcttcctaagtagctgggtttacaggcacccaccaccatgcccagctaatttttgtatttttaatagagacggggtttcgccatttggccaggctggtcttgaactcctgacgtcaagtgatctgcctgccttggtctcccaatacaggcatgaaccactgcacccacctacttagatatttcatgtgctatagacattagagagatttttcatttttccatgacatttttcctctctgcaaatggcttagctacttgtgtttttcccttttggggcaagacagactcattaaatattctgtacattttttctttatcaaggagatatatcagtgttgtctcatagaactgcctggattccatttatgttttttctgattccatcctgtgtccccttcatccttgactcctttggtatttcactgaatttcaaacatttgtcagagaagaaaaacgtgaggactcaggaaaaataaataaataaaagaacagccttttcccttagtattaacagaaatgtttctgtgtcattaaccatctttaatcaatgtgacatgttgctctttggctgaaattcttcaacttggaaatgacacagacccacagaaggtgttcaaacacaacctactctgcaaaccttggtaaaggaaccagtcagctggccagatttcctcactacctgccatgcatacatgctgcgcatgttttcttcattcgtatgttagtaaagttttggttattatatatttaacatgtggaagaaaacaagacatgaaaagagtggtgacaaatcaagaataaacactggttgtagtcagttttgtttgttaa

SEQ ID NO: 40 - DNA, 2032 bp, Homo sapiens
ggctcgaggccaggatgcctccagtctgggggaaaatgcttcctcatttgcttctcccagcccacctcaagcagtctccccaccccttgagtctcagcagtgttaaagctgttactttcacagcttcctgggagcgagtgctttctcaagcccgtcttgcaaggtcttccacttcagcacaatgctactgcctaaaaaaatgaagctcctgctgtttctggtttcccagatggccatcttggctctattcttccacatgtacagccacaacatcagctccctgtctatgaaggcacagcccgagcgcatgcacgtgctggttctgtcttcctggcgctctggctcttcttttgtggggcagctttttgggcagcacccagatgttttctacctgatggagcccgcctggcacgtgtggatgaccttcaagcagagcaccgcctggatgctgcacatggctgtgcgggatctgatacgggccgtcttcttgtgcgacatgagcgtctttgatgcctacatggaacctggtccccggagacagtccagcctctttcagtgggagaacagccgggccctgtgttctgcacctgcctgtgacatcatcccacaagatgaaatcatcccccgggctcactgcaggctcctgtgcagtcaacagccctttgaggtggtggagaaggcctgccgctcctacagccacgtggtgctcaaggaggtgcgcttcttcaacctgcagtccctctacccgctgctgaaagacccctccctcaacctgcatatcgtgcacctggtccgggacccccgggccgtgttccgttcccgagaacgcacaaagggagatctcatgattgacagtcgcattgtgatggggcagcatgagcagaaactcaagaaggaggaccaaccctactatgtgatgcaggtcatctgccaaagccagctggagatctacaagaccatccagtccttgcccaaggccctgcaggaacgctacctgcttgtgcgctatgaggacctggctcgagcccctgtggcccagacttcccgaatgtatgaattcgtgggattggaattcttgccccatcttcagacctgggtgcataacatcacccgaggcaagggcatgggtgaccacgctttccacacaaatgccagggatgcccttaatgtctcccaggcttggcgctggtctttgccctatgaaaaggtttctcgacttcagaaagcctgtggcgatgccatgaatttgctgggctaccgccacgtcagatctgaacaagaacagagaaacctgttgctggatcttctgtctacctggactgtccctgagcaaatccactaagagggttgagaaggctttgctgccacctggtgtcagcctcagtcactttctctgaatgcttctgagccttgcctacatctctgagccttaactacatgtctgtgggtatcacactgagtgtgagttgtgtccacacgtgctcaagcagaaggacttttgtgtccatgcttgtgtctagaaaacagactggggaaccttatgtgagcagcacatcccaccagtgaaacagggtattgctcttcttcttttcttgatcttcctgtctgggcagacttcagagactttgtggcctggaggcctattaagcacgacacagtatcagtggaattgatccataaacctccctgtccacatcttgcccaatggggaatggatctttcaccaaagagctcaccagcattttccacagagatgcaaattctgagcccttggagttcccagtggattcaaggaaggaagtgggaacaaggttggatgcctacttatgagcttgaccatcacagctatcggtaatcagaaatatgaaacaaaatctctgcacaaaagagcaagctcttaagttcacagggtgcctgggctgcatttgaatatcacttcccctctgcattttcccatcacatagaagactttgacctgtgaagctgccatctgttaatactaaaattcccaaataagaaaaaaaaaaaaaaa

SEQ ID NO: 41 - DNA, 6885 bp, Homo sapiens
gacgacgtttgggagcctttgctgagtccagggagagaggcgtcccccaccgtgccgctgcagctcgggcagagccgccaagctttggggtgctgaggaacctctaatcatctcccatggatttgtgatcagcgttgcagctctcccagcagccctggacagtggcccccagcagtcagcatgtggctgccgcgcgtctccagcacagcagtgaccgcgctcctcctggcgcagaccttcctcctcctctttctggtttcccggccagggccctcgtccccagcaggcggcgaggcgcgcgtgcatgtgctggtgctgtcctcgtggcgctcgggctcgtccttcgtgggccaactcttcaaccagcaccccgacgtcttctacctaatggagcccgcgtggcacgtgtggaccaccctgtcgcagggcagcgccgcaacgctgcacatggctgtgcgcgacctggtgcgctccgtcttcctgtgcgacatggacgtgtttgatgcctatctgccttggcgccgcaacctgtccgacctcttccagtgggccgtgagccgtgcactgtgctcgccacccgcctgcagtgcctttccccgaggcgccatcagcagcgaggccgtgtgcaagccactgtgcgcgcggcagtccttcaccctggcccgggaggcctgccgctcctacagccacgtggtgctcaaggaggtgcgcttcttcaacctgcaggtgctctacccgctgctcagcgaccccgcgctcaacctacgcatcgtgcacctggtgcgcgacccgcgggccgtgctgcgctcccgggagcagacagccaaggctctggcgcgtgacaacggcatcgtgctgggcaccaacggcacgtgggtggaggccgaccccggcctgcgcgtggtgcgcgaggtgtgccgtagccacgtacgcatcgccgaggccgccacactcaagccgccaccctttctgcgcggccgctaccgcctggtgcgcttcgaggacctggcgcgggagccgctggcagaaatccgtgcgctctacgccttcactgggctcagtctcacgccacagctcgaggcctggatccataacatcacccacggatctggacctggtgcgcgccgcgaagccttcaagacttcgtccaggaatgcgctcaacgtctcccaggcctggcgccatgcgctgccctttgccaagatccgccgcgtgcaggaactgtgcgctggtgcgctgcagctgctgggctaccggcctgtgtactctgaggacgagcagcgcaacctcgcccttgatctggtgctgccacgaggcctgaacggcttcacttgggcatcatccaccgcctcgcacccccgaaattagtggaggccacagttgtagcaggcgctaggcccgggaggagagtgcatggtgcagagggggctggggcgcacggagaagcaggtccctatattgaccaaggagtttgtggtacgacccctccccctccccaagtaggcaaggactgcacgtttctttctctcttgattcttggttttcctttgagtcctctggagctgccttctcatcaggtgcactcttcatggaaagcaactcttgcccctcctcctctgggcacagggtgtgcgttcagatgacttggctcctactcaagggctttcttcccctttaactctctccttctggtgacacatcctgcagcagctgagggggtgccctggcactggctgggagtggagaggcactgtggtgaaatggctccagaggtctgtacatcacatacatatgcacacaggcacacatggcaaaactcggaagtgaaaggacttgtctgaaatcacatggtgagaaggaggatgaagggaggagagagcttttgctctgggtctccagtggataggagaggacctgcctcctgggtgagaagggtcagattttcctattttaattgctttagggaagagcaagcagagtcatgaccagggacacagctgagagatagaggaggctgtgaatgctgagaccagagtttatcatgctggacaagcctggaaggaggcaataagtgggaaaggtaggaggagagaaggctggggagggctgggcagcaagccaggcacagtgagtggcagagcaagagggggaaagcaggatcagtgcctggaaggcaggtgtgcccgtcagcggggagtggaactcatcaggcttgccaagaggttggaagggaaatggctctgggctggaactgtcttcccttggtccttctggtccaggccttggaggaaagcagaggatgatccctgcctgtgagccacacctcctagctctgggggcaaaggggcttagtaaaggaatgctggatgtgtagagggtttagtcccgagctcaggaaatgagagcctataagtgcccagtacatgtttaaaagaagagctcatggaacctctggaaaggacagggaagttgagttagccacataaatgaacccaagtcacattggaacacagagctggtctgggaactgtgttggctgccaacagaacttctgaccctgttacctgtgaaatgaggcagtttccctcacgttgccatcagctaccaggagcgatgctggtggtcactagcttctgatcctcatcctgggtgtggccacagattgggggaacctggattgtggagtcacatcctccctgcaaagcaagcagggcaagggagatctggcattttctgctttacgtggagggagaacaggcacattagccttgaagctgaagctcattttaggttccttccaggtttagaagcttcaaccaaatgaaacttgaatctgtccctcgtgacaattataggaggaaggtatttaaaaccccagatttatgaatgtgtactacatggcttagagaatgtctttgttcttgttcaggtggttataacaaaataccttaagagtgggtaacttggctggatgcagtggctcatgcctgtaatcccagcactgtgggaggccgagggggatgaatcacctgaggtcaggcattcaagaacagcctggccaacatggcgaagcccctcctctactaaaaatacaaaattagcgaggcatggtcgcacatacctgtaatcccagctcctcgggaagctgaggcaggagaatcgcttgaacccaggaggcggaggttgcagtgagccaagatcacgccattgcactccagcctgggtgacagagcaagactccatctcaaaaaaaaaaaaaagactgggtaacttataaacaaatgttcttctcacaagtctggagactgggaagtccaagatcaagccaccagtgctgtctgatgagggcccactttttcaaagacagtgccttctagctgtgtcctcttatcgtagaagatgggagacagctctccagggccatttttttttttttttttttttttttgagatggagtctggctctgtcgcccaggctggagtgcagtggcacaatctcggctcactgcaacctctgcctctctctgcctcctgagttcaagcaattctcctgcctcagcctcctgaggagctgggactacagggatgcaccaccatgcccagctaatttttgtatttttgtagacactgggtttcaccatattggccaggttggtctcaaactcctgacctcaagtgatctgcccacctcagcctcccaaagtgctgagattacaggcatgagccactgtacccagtctccagggccttttaaagaatgtcactaatcccattcttgaggtctccaccttcattatctaatcacctcccaaaggctccacatcccaacaccatcatattgtgggttaagatttcaaccacaagccaggcgtggtggctcatgcctgtaatcccagcattttggaaggctgaggcaggtggatcacttgaggtcaggagtttgagaccagcctggccaacatggtgaaaccccatctctactaaaaataaaaaaaattagccgggtgtggtggtgcacacctgtaattccagctactcaggaggctgaggcaggagaatcccttgaatccaggaggcggacagtgcagtgagccgagataatgccactgcactccagcctggatgacagagcaagactccatctcatgcccagccagcatgcccaacaagcttcatttgcccctgtttaggtcacaaattttattgatggctgcaattaatggcctcttggtatccaagtcctttgttgtatgacccatccattctcccctgactcccaaggtgtcaggacatgcttgactggctcctgaatttgctctctgcgcatgggcagtacagtcaagcctcacagtgaacccaggtcagctttcaggacaaagaaagtggcctggctgactaggcacagtaaagccagggctgggtaggtacatacttgtgctgatcacgtatgtcttatatctctgtgagagtgcagtcccaacaggaaggtttaatcactggggactgcccaatgctgtgacagggcacagagctctgggttgctgtgggggtgactgcattgaccactgttagtggtttgctgtgttgacactctgtgctgtgtgaccatggctcctgccatcaagaagtagagtctgtttctccacctctgaatccaggctggtcctgtgacttgctttgtcctgtagacaagtgtagtgcaacttcctgtgagccagtttgaagcataggccttggaagcaaaactttacctccacctgtcttaggttttcagctggggctctgctgtgatttgattgtgtctcccaaagttggaaccttgatccccagtgttgtgaggtgaggcttgatggaaagtaaattacgccgtgcgggttatgcccttgtgaatgggtagagaacattatttctgggcgcaggcatggtagctcatgtctgtaatcccagcattttgggaggttgaggtgtgcggattacttgaggtcaggagtttgagaccagcctggccaacaaggtaaaacaccatttctagttaaaatacaaaaattagccaggtgtggtggcacatgcctgtaaggccagctacttgggaggctgagacaggagaatcgcttgaacccaggaggcagagattgcagtgagctgagatcgcaccactgtactccagcctgggcaacaaagcgagagtctgtcttaaaaaaaaccaccattatttcaggagtgagttggttatcctgagagtggtgccttttaaatgaaggagttcattctttgtctttctctcgccctcactttgcccttctgccatatgatgccttccatcatgctaggacacagcaagaaggctctcgctagatgctggctccttgatcttgggcttcccagcctccagaactgtaagccaatacacttctatttattatatatgacccttgctgggttcagtggctcacgcctgtaatcccaatactttgcaaggctgaggcaggaggatcacttgagaccaggcactcaagaccagcctgggcaacatagtgagaccccatctctacaaagttaaaaaaaaattagcagggcatggtgtcgtgcacctgtagtcctagctacttgggaggctgagttgggaggactgcttgaccctgggaggttgaggctacattgaaccatgatcatgccagtgcactccagcctgagtgacagagcaagacacctatctctaaataaatgaccccatctgtggtattgttatagcaaaacaaaacagattaagagagactttttaatgaaaagacagattcacaaagaaaaacaatgtttttgtttctgtttttttgaggcagagtcttgctcttgtcccccaggctggagtgcagtggcgccatcttggctcactgcaacctccgcctcccagtttcaagcgattctcctgcctcagcctcccgagtagctgggattacagatgtacaccaccacgcccggctaattttttttgtatttttagtagagatggggtttcaccatgtcgatcaggctgggctggaactcctgacctcaggtgatccacctgccttggcctcccaatgtgctaggattacaggcatgagccactgtacctggcgaaaaacagtttgttaacacaggcagccaacatcactcaggataagcctcaatgaaaagtaacaaagtgatggcttggaacactgtcttacacagcatttttaaaaaatacaataaatttgtagagataggatgaccaaggacaacagttttaggcttccaaaggtggtaaactatgggatggtaaatatccgagaggaagctgatgcaacaggatttgtctgcagcagcctctggtaccacctctgagtcaagggttgtgtccagtgatggagagtttatatcgtgcctttaggcagaaaaggggagggaaacctgaacttttcctgcactttctgcttcttaattgccttcagctgaaaatcattttttatgtgaaaaaggcatagtctgagctgacgcctctgctttcctccacctgaagagaacctgcgtgctgctcctttgcttcggacctccgcctctgcccgggagaaagcccaggccagcctgctggacaagcagagaccatgagaaggagagttcaggggtcccaaaccaggccatcctagaccagccagctccagctgatccgcacgcagccacttcggctaccttctactggccaaagggagtcccagggctcacccagattcagaggtggggaaactgagtccaccacttgagaagagtagctataaagacatatgagcgaggccagctgagcccagcactgcggccaagtcgaagactttaggagcaataaaagtgcttattgtgtttcagtca

SEQ ID NO: 42 - DNA, 2496 bp, Homo sapiens
gggactcgtcccagagtttgctgccgccgccgccgctgccattagagcggttttaattagctgcaggatttttaatgagctgaaatcaagaagagccccatctcagaagtaagcgagagccgcgcgcagggaagaactagtctgacaaaacagaaggaggtggtgctctcgggggactgggctgtaggctcccaccgatcgatcggcgacgagcagatgagttcccgaggccaggaggctgaggagggaagccagggctcagagaccagcgcccggtgcagagtccccgctgctgccaccgcggcagaaggcacggtgccggattcaaggtgacggcagtgcctggctccattctcctcaagttgccatagcagcctctctcccaacaagcagcttctccgggagccctcagccgggagggacgtcattgttctctcctgcccgtgtggtgcaaggagacccaccggacagagaactttcccgagcccggggtccgctgaccacgtgggtgcacccatgctgcctggagccaggcacagggacaggtccccacggccacagggaatcctctgggcagctgaggggagcgtccaggcccagaagcagctgcagccaagcgtgtccttggagccgtccatgcgtctgtccgcctgctgccggtcgccactggagatctcggcctgatggacgcctggtgtggacgatgagggaagaacgtgccccccacacccaagaggtgacccctgagccagccccggatgaccctgcgacctggaacaatgcggctggcctgcatgttctcttccatcctgctgttcggagctgcaggcctcctcctcttcatcagcctgcaggaccctacggagctcgccccccagcaggtgccaggaataaagttcaacatcaggccaaggcagccccaccacgacctcccaccaggcggctcccaggatggtgacttgaaggaacccacagagagggtcactcgggacttatccagtggggccccgaggggccgcaacctgccagcgcctgaccagcctcaacccccgctgcagaggggaacccgtctgcggctccgccagcgccgtcgccgtctgctcatcaagaaaatgccagctgcggcgaccatcccggccaacagctcggacgcgcccttcatccggccgggacccgggacgctggatggccgctgggtcagcctgcaccggagccagcaggagcgcaagcgggtgatgcaggaggcctgcgccaagtaccgggcgagcagcagccgccgggccgtcacgccccgccacgtgtcccgtatcttcgtggaggaccgccaccgcgtgctctactgcgaggtgcccaaggccggctgctccaattggaagcgggtgctcatggtgctggccggcctggcctcgtccactgccgacatccagcacaacaccgtccactatggcagcgctctcaagcgcctggacaccttcgaccgccagggtatcttgcaccgtctcagcacctacaccaagatgctctttgtccgcgagcccttcgagaggctggtgtccgccttccgcgacaagtttgagcaccccaacagctactatcacccggtcttcggcaaggccatcctggcccggtaccgcgccaatgcctctcgggaggccctgcggaccggctctggggtgcgttttcccgagttcgtccagtacctgctggacgtgcaccggcccgtggggatggacattcactgggaccatgtcagccggctctgcagcccctgcctcatcgactacgatttcgtaggcaagttcgagagcatggaggacgatgccaacttcttcctgagcctcatccgcgcgccgcggaacctgaccttcccccggttcaaggaccggcactcgcaggaggcgcggaccacagcgaggatcgcccaccagtacttcgcccaactctcggccctgcaaaggcagcgcacctacgacttctactacatggattacctgatgttcaactattccaagccctttgcagatctgtactgaggggcgccgcagctggccggggccgccctgccccggtcactcacctgtgctcccgggcatcctcctgtccctggctcctcatcctgggagcaacagggctctgaggacgtgaggagccatcgctgtgggaggcagcaggccccgggtggggggcagaggcgcccagccttggatggggaccccagcccctggcctgtacctgtttcctcattccttggctgagggagaggctgagaactgggcagacacccctggagctcagccgacagttttgatgagcagggaagtctgaggcccagaggacggggggcccagcggtaagggatgtcccgcactcccttagccattgccttggaccaaaccacgtggtttgcagcttttctacgagccaggggggaggttcccttggattaaggttccaaataaagcacatggtttccagagcaaaaaaaaaaaaaaaaaa

SEQ ID NO: 43 - DNA, 2219 bp, Homo sapiens
gtcagggccagggtgagcgcccgactccgagctgtccccgctcccggcgcggcgctccgctctcagccacctcacggctgccaggagtgcgcgggagtttgccccggagcgcggggaagtttcctccgaagctgcgctcctggaacagcagcacctgcaagcgcccggcagcggcccgcgaggttactttatggaattgggctcttagagaacaagaaaagactgaagttttacgggaaaacaaatcatgtggtcttcagattctgaaataaggagaaatgcagccatctgaaatggtcatgaaccccaaacaagtcttcctctctgtgctgatatttggagtagctgggctactcctcttcatgtatttgcaagtctggattgaagaacaacatacagggagagtggagaagagaagagaacaaaaagtaacttcaggatggggaccagtgaagtacttgcggcctgtacccagaatcatgagtacagaaaaaatccaggaacatatcaccaaccagaaccccaagtttcacatgcctgaggatgtacgagaaaaaaaggaaaatcttctactcaattctgagagatctactaggctcttaacaaagaccagtcattcacaaggaggggatcaagctttaagtaagtccacagggtcaccaacagagaagttgattgaaaaacgtcaaggagctaagactgtttttaacaagttcagcaacatgaattggccagtggacattcaccctttaaacaaaagtttagtcaaagataataaatggaagaaaactgaggagacccaagagaaacgaaggtctttccttcaggagttttgcaagaaatacggtggggtgagtcatcatcagtcacatctttttcatacagtatccagaatctatgtagaagataaacacaaaatcttatattgtgaggtacctaaggctggctgttccaattggaaaagaattctgatggtactaaatggattggcttcctctgcatacaacatctcccacaatgctgtccactacgggaagcatttgaagaagctagatagctttgacctaaaagggatatatacccgcttaaatacttacaccaaagctgtgtttgttcgtgatcccatggaaagattagtatcagcctttagggacaaatttgaacaccccaatagttattaccatccagtattcggaaaggcaattatcaagaaatatcgaccaaatgcctgtgaagaagcattaattaatggatctggagtcaagttcaaagagtttatccactacttgctggattcccaccgtccagtaggaatggacattcactgggaaaaggtcagcaaactctgctatccgtgtttgatcaactatgattttgtagggaaatttgagactttggaagaagatgccaattactttttacagatgatcggtgctccaaaggagctgaaatttcccaactttaaggataggcactcttccgatgaaagaaccaatgctcaagtcgtgagacagtatttaaaggatctgactagaactgagagacaattaatctatgacttttattacttggactatttaatgtttaattatacaactccatttttgtagtttgcattcattttctaaaaccctgtatatacttaatgatgataagttcaaatcagctgtaatttttctataattctctgtatgacagaaatttaaccaagtgcagttgtcttgatttaatgtagatttttaccaaatagtatgacaccaattggcacaaagttataggaaaatcacctacaggagatgtaaacaacttgagttgctctaaaatgtttggaaaagagctgcttttgcattatgaattatattgttgaagcaataacctagccagctgttgcattagctaaagcagcctcttgcaatggtaggaaaaaaggatctcaaatagcatgagtgtatgtctatatcctgaaatttattgtctaaaatgcatgaatatatttttagcagtctgtggcatattaatcaaactgttgaattgttttcttacaccctggaaatctttctatcaactataatgataaatccattttgaagtgatattttggacttaggcattttactttagattggaaggcattatgtgatttacaatatgagaatatagcagaaaaaccagatgaggctgtggctttttatattcaacagccaataaaaaatgcacaa

SEQ ID NO: 44 - DNA, 1741 bp, Homo sapiens
gatcgggcggcgccgagctgaggtggtgagggactagctcccggatgtggagaagctggggagaaggcgtgggaggaagatggactcggtggagaagggggccgccacctccgtctccaacccgcgggggcgaccgtcccggggccggccgccgaagctgcagcgcaactctcgcggcggccagggccgaggtgtggagaagcccccgcacctggcagccctaattctggcccggggaggcagcaaaggcatccccctgaagaacattaagcacctggcgggggtcccgctcattggctgggtcctgcgtgcggccctggattcaggggccttccagagtgtatgggtttcgacagaccatgatgaaattgagaatgtggccaaacaatttggtgcacaagttcatcgaagaagttctgaagtttcaaaagacagctctacctcactagatgccatcatagaatttcttaattatcataatgaggttgacattgtaggaaatattcaagctacttctccatgtttacatcctactgatcttcaaaaagttgcagaaatgattcgagaagaaggatatgattctgttttctctgttgtgagacgccatcagtttcgatggagtgaaattcagaaaggagttcgtgaagtgaccgaacctctgaatttaaatccagctaaacggcctcgtcgacaagactgggatggagaattatatgaaaatggctcattttattttgctaaaagacatttgatagagatgggttacttgcagggtggaaaaatggcatactacgaaatgcgagctgaacatagtgtggatatagatgtggatattgattggcctattgcagagcaaagagtattaagatatggctattttggcaaagagaagcttaaggaaataaaacttttggtttgcaatattgatggatgtctcaccaatggccacatttatgtatcaggagaccaaaaagaaataatatcttatgatgtaaaagatgctattgggataagtttattaaagaaaagtggtattgaggtgaggctaatctcagaaagggcctgttcaaagcagacgctgtcttctttaaaactggattgcaaaatggaagtcagtgtatcagacaagctagcagttgtagatgaatggagaaaagaaatgggcctgtgctggaaagaagtggcatatcttggaaatgaagtgtctgatgaagagtgcttgaagagagtgggcctaagtggcgctcctgctgatgcctgttctactgcccagaaggctgttggatacatttgcaaatgtaatggtggccgtggtgccatccgagaatttgcagagcacatttgcctactaatggaaaaggttaataattcatgccaaaaatagaaattagcgtaatattgagaaaaaaatgatacagccttcttcagccagtttgcttttatttttgattaagtaaattccatgttgtaatgttacagagagtgtgatttggtttgtgatatatatatattgtgctctacttttctctttacgcaagataattatttagagactgattacagtctttctcagatttttagtaaatgcaagtaagaacatcatcaaagttcactttgtattgtaccctgtaaaactgtgtgtttgtgtgctttcaaagatgttgggattttatttatctggggacagtgtgtatggtaagacatgcccttctattaataaaactacatttctcaaacttga

SEQ ID NO: 45 - DNA, 2492 bp, Homo sapiens
gggtgcagaggtgccgccgccgccgcgagccagtcgggagcgcgcgaggcgcggggagcctgggaccaggagcgagagccgcctacctgcagccgccgcccacggcacggcagccaccatggcgctcctgctgtgcttcgtgctcctgtgcggagtagtggatttcgccagaagtttgagtatcactactcctgaagagatgattgaaaaagccaaaggggaaactgcctatctgccatgcaaatttacgcttagtcccgaagaccagggaccgctggacatcgagtggctgatatcaccagctgataatcagaaggtggatcaagtgattattttatattctggagacaaaatttatgatgactactatccagatctgaaaggccgagtacattttacgagtaatgatctcaaatctggtgatgcatcaataaatgtaacgaatttacaactgtcagatattggcacatatcagtgcaaagtgaaaaaagctcctggtgttgcaaataagaagattcatctggtagttcttgttaagccttcaggtgcgagatgttacgttgatggatctgaagaaattggaagtgactttaagataaaatgtgaaccaaaagaaggttcacttccattacagtatgagtggcaaaaattgtctgactcacagaaaatgcccacttcatggttagcagaaatgacttcatctgttatatctgtaaaaaatgcctcttctgagtactctgggacatacagctgtacagtcagaaacagagtgggctctgatcagtgcctgttgcgtctaaacgttgtccctccttcaaataaagctggactaattgcaggagccattataggaactttgcttgctctagcgctcattggtcttatcatcttttgctgtcgtaaaaagcgcagagaagaaaaatatgaaaaggaagttcatcacgatatcagggaagatgtgccacctccaaagagccgtacgtccactgccagaagctacatcggcagtaatcattcatccctggggtccatgtctccttccaacatggaaggatattccaagactcagtataaccaagtaccaagtgaagactttgaacgcactcctcagagtccgactctcccacctgctaaggtagctgcccctaatctaagtcgaatgggtgcgattcctgtgatgattccagcacagagcaaggatgggtctatagtatagagcctccatatgtctcatctgtgctctccgtgttcctttcctttttttgatatatgaaaacctattctggtctaaattgtgttactagcctcaaaatacatcaaaaaataagttaatcaggaactgtacggaatatatttttaaaaatttttgtttggttatatcgaaatagttacaggcactaaagttagtaaagaaaagtttaccatctgaaaaagctggattttctttaagaggttgattataaagttttctaaatttatcagtacctaagtaagatgtagcgctttgaatatgaaatcataggtgaagacatgggtgaacttacttgcataccaagttgatacttgaataaccatctgaaagtggtacttgatcatttttaccattatttttaggatgtgtatttcatttatttatggcccaccagtctcccccaaattagtacagaaatatccatgacaaaattacttacgtatgtttgtacttggttttacagctcctttgaaaactctgtgtttggaatatctctaaaaacatagaaaacactacagtggtttagaaattactaattttacttctaagtcattcataaaccttgtctatgaaatgacttcttaaatatttagttgatagactgctacaggtaatagggacttagcaagctcttttatatgctaaaggagcatctatcagattaagttagaacatttgctgtcagccacatattgagatgacactaggtgcaatagcagggatagattttgttggtgagtagtctcatgccttgagatctgtggtggtcttcaaaatggtggccagccagatcaaggatgtagtatctcatagttcccaggtgatatttttcttattagaaaaatattataactcatttgttgtttgacacttatagattgaaatttcctaatttattctaaattttaagtggttctttggttccagtgctttatgttgttgttgtttttggatggtgttacatattatatgttctagaaacatgtaatcctaaatttaccctcttgaatataatccctggatgatattttttatcataaatgcagaataatcaaatacattttaagcaagttaagtgtcctccatcaattctgtattccagacttgggaggatgtacagttgctgttgtgtgatcaaacatgtctctgtgtagttccagcaaatcaagctgagctttgaaaaagtttgtcttagttttgtgaaggtgatttattcttaaaaaaaaaaaaaaaaaaaaaa

SEQ ID NO: 46 - DNA, 2038 bp, Homo sapiens
aagtatccgttcttggctgcctttctttaattgcgtttccagtactctctcggtgattctactcttgaacataggatgaaatttggaatcacacttctcttccacttccatccccaccctctaatgcccatattaaaaatggcggccgccgccttccgcagtaatggttgttcagcgaacaagatccgggcggaaacagtagataggcgggtgcagcggggcagaacataggttgccttagagaggttccccggtgtcccgacggcggctcaagtcagagttgctgggttttgctcagattggtgtgggaagagcctgcctgtggggagcggccactccatactgctgaggcctcaggactgctgctcagcttgcccgttacctgaagaggcggcggagccgggcccctgaccggtcaccatgtgggccttctcggaattgcccatgccgctgctgatcaatttgatcgtctcgctgctgggatttgtggccacagtcaccctcatcccggccttccggggccacttcattgctgcgcgcctctgtggtcaggacctcaacaaaaccagccgacagcagattttgtggccctgataggtgccctccttgccatctgctgcatgatcttcctgggctttgcggatgatgtactgaatctgcgctggcgccataagctgctgctacctacagctgcctcactacctctcctcatggtctatttcaccaactttggcaacacgaccattgtggtgcccaagcccttccgcccgatacttggcctgcatctggacttgggaatcctgtactatgtctacatggggctgctggcagtgttctgtaccaatgccatcaatatcctagcaggaattaacggcctagaggctggccagtcactagtcatttctgcttccatcattgtcttcaacctggtagagttggaaggtgattgtcgggatgatcatgtcttttccctctacttcatgatacccttttttttcaccactttgggattgctctaccacaactggtacccatcacgggtgtttgtgggagataccttctgttactttgctggcatgacctttgccgtggtgggcatcttgggacacttcagcaagaccatgctactattcttcatgccccaggtgttcaacttcctctactcactgcctcagctcctgcatatcatcccctgccctcgccaccgcatacccagactcaatatcaagacaggcaaactggagatgagctattccaagttcaagaccaagagcctctctttcttgggcacctttattttaaaggtggcagagagcctccagctggtgacagtacaccagagtgagactgaagatggtgaattcactgaatgtaacaacatgaccctcatcaacttgctacttaaagtccttgggcccatacatgagagaaacctcacattgctcctgctgctgctgcagatcctgggcagtgccatcaccttctccattcgatatcagctcgttcgactcttctatgatgtctgagtcccttgatcattgtcctttacctcacagtctctaggattcctgactcaggctgacctctctctctggtcccagactgcctccttgcccaggcctctctcactcttcatactcctccagattttgttctcagcattttcctttctctgtgatcattggcatcctgggcgtttcttgccctctgctgactactgattggattttacctatggctttctgcaacttgctactctctccctctccatcccatctttgcagcctcatagggtgggatacagcagctttttttgcagttatccacactcacatttcagagtcctgactctcaaggaaccactggtttttgggatagaacttgggccagggctaggaacacaggctccacggtgacatgtcatttgattgtaaattaagtgttctgattagtaagaactaagcagggggccacatgctctcaatggagacaataaagtgttgtctttttcttattgtttaaaaaaaaaaaaaaaaaa

SEQ ID NO: 47 - DNA, 9730 bp, Homo sapiens
ccgaccaacaccaacacccagctccgacgcagctcctctgcgcccttgccgccctccgagccacagctttcctcccgctcctgcccccggcccgtcgccgtctccgcgctcgcagcggcctcgggagggcccaggtagcgagcagcgacctcgcgagccttccgcactcccgcccggttccccggccgtccgcctatccttggccccctccgctttctccgcgccggcccgcctcgcttatgcctcggcgctgagccgctctcccgattgcccgccgacatgagctgcaacggaggctcccacccgcggatcaacactctgggccgcatgatccgcgccgagtctggcccggacctgcgctacgaggtgaccagcggcggcgggggcaccagcaggatgtactattctcggcgcggcgtgatcaccgaccagaactcggacggctactgtcaaaccggcacgatgtccaggcaccagaaccagaacaccatccaggagctgctgcagaactgctccgactgcttgatgcgagcagagctcatcgtgcagcctgaattgaagtatggagatggaatacaactgactcggagtcgagaattggatgagtgttttgcccaggccaatgaccaaatggaaatcctcgacagcttgatcagagagatgcggcagatgggccagccctgtgatgcttaccagaaaaggcttcttcagctccaagagcaaatgcgagccctttataaagccatcagtgtccctcgagtccgcagggccagctccaagggtggtggaggctacacttgtcagagtggctctggctgggatgagttcaccaaacatgtcaccagtgaatgtttggggtggatgaggcagcaaagggcggagatggacatggtggcctggggtgtggacctggcctcagtggagcagcacattaacagccaccggggcatccacaactccatcggcgactatcgctggcagctggacaaaatcaaagccgacctgcgcgagaaatctgcgatctaccagttggaggaggagtatgaaaacctgctgaaagcgtcctttgagaggatggatcacctgcgacagctgcagaacatcattcaggccacgtccagggagatcatgtggatcaatgactgcgaggaggaggagctgctgtacgactggagcgacaagaacaccaacatcgctcagaaacaggaggccttctccatacgcatgagtcaactggaagttaaagaaaaagagctcaataagctgaaacaagaaagtgaccaacttgtcctcaatcagcatccagcttcagacaaaattgaggcctatatggacactctgcagacgcagtggagttggattcttcagatcaccaagtgcattgatgttcatctgaaagaaaatgctgcctactttcagttttttgaagaggcgcagtctactgaagcatacctgaaggggctccaggactccatcaggaagaagtacccctgcgacaagaacatgcccctgcagcacctgctggaacagatcaaggagctggagaaagaacgagagaaaatccttgaatacaagcgtcaggtgcagaacttggtaaacaagtctaagaagattgtacagctgaagcctcgtaacccagactacagaagcaataaacccattattctcagagctctctgtgactacaaacaagatcagaaaatcgtgcataagggggatgagtgtatcctgaaggacaacaacgagcgcagcaagtggtacgtgacgggcccgggaggcgttgacatgcttgttccctctgtggggctgatcatccctcctccgaacccactggccgtggacctctcttgcaagattgagcagtactacgaagccatcttggctctgtggaaccagctctacatcaacatgaagagcctggtgtcctggcactactgcatgattgacatagagaagatcagggccatgacaatcgccaagctgaaaacaatgcggcaggaagattacatgaagacgatagccgaccttgagttacattaccaagagttcatcagaaatagccaaggctcagagatgtttggagatgatgacaagcggaaaatacagtctcagttcaccgatgcccagaagcattaccagaccctggtcattcagctccctggctatccccagcaccagacagtgaccacaactgaaatcactcatcatggaacctgccaagatgtcaaccataataaagtaattgaaaccaacagagaaaatgacaagcaagaaacatggatgctgatggagctgcagaagattcgcaggcagatagagcactgcgagggcaggatgactctcaaaaacctccctctagcagaccaggggtcttctcaccacatcacagtgaaaattaacgagcttaagagtgtgcagaatgattcacaagcaattgctgaggttctcaaccagcttaaagatatgcttgccaacttcagaggttctgaaaagtactgctatttacagaatgaagtatttggactatttcagaaactggaaaatatcaatggtgttacagatggctacttaaatagcttatgcacagtaagggcactgctccaggctattctccaaacagaagacatgttaaaggtttatgaagccaggctcactgaggaggaaactgtctgcctggacctggataaagtggaagcttaccgctgtggactgaagaaaataaaaaatgacttgaacttgaagaagtcgttgttggccactatgaagacagaactacagaaagcccagcagatccactctcagacttcacagcagtatccactttatgatctggacttgggcaagttcggtgaaaaagtcacacagctgacagaccgctggcaaaggatagataaacagatcgactttaggttatgggacctggagaaacaaatcaagcaattgaggaattatcgtgataactatcaggctttctgcaagtggctctatgatgctaaacgccgccaggattccttagaatccatgaaatttggagattccaacacagtcatgcggtttttgaatgagcagaagaacttgcacagtgaaatatctggcaaacgagacaaatcagaggaagtacaaaaaattgctgaactttgcgccaattcaattaaggattatgagctccagctggcctcatacacctcaggactggaaactctgctgaacatacctatcaagaggaccatgattcagtccccttctggggtgattctgcaagaggctgcagatgttcatgctcggtacattgaactacttacaagatctggagactattacaggttcttaagtgagatgctgaagagtttggaagatctgaagctgaaaaataccaagatcgaagttttggaagaggagctcagactggcccgagatgccaactcggaaaactgtaataagaacaaattcctggatcagaacctgcagaaataccaggcagagtgttcccagttcaaagcgaagcttgcgagcctggaggagctgaagagacaggctgagctggatgggaagtcggctaagcaaaatctagacaagtgctacggccaaataaaagaactcaatgagaagatcacccgactgacttatgagattgaagatgaaaagagaagaagaaaatctgtggaagacagatttgaccaacagaagaatgactatgaccaactgcagaaagcaaggcaatgtgaaaaggagaaccttggttggcagaaattagagtctgagaaagccatcaaggagaaggagtacgagattgaaaggttgagggttctactgcaggaagaaggcacccggaagagagaatatgaaaatgagctggcaaaggtaagaaaccactataatgaggagatgagtaatttaaggaacaagtatgaaacagagattaacattacgaagaccaccatcaaggagatatccatgcaaaaagaggatgattccaaaaatcttagaaaccagcttgatagactttcaagggaaaatcgagatctgaaggatgaaattgtcaggctcaatgacagcatcttgcaggccactgagcagcgaaggcgagctgaagaaaacgcccttcagcaaaaggcctgtggctctgagataatgcagaagaagcagcatctggagatagaactgaagcaggtcatgcagcagcgctctgaggacaatgcccggcacaagcagtccctggaggaggctgccaagaccattcaggacaaaaataaggagatcgagagactcaaagctgagtttcaggaggaggccaagcgccgctgggaatatgaaaatgaactgagtaaggtaagaaacaattatgatgaggagatcattagcttaaaaaatcagtttgagaccgagatcaacatcaccaagaccaccatccaccagctcaccatgcagaaggaagaggataccagtggctaccgggctcagatagacaatctcacccgagaaaacaggagcttatctgaagaaataaagaggctgaagaacactctaacccagaccacagagaatctcaggagggtggaagaagacatccaacagcaaaaggccactggctctgaggtgtctcagaggaaacagcagctggaggttgagctgagacaagtcactcagatgcgaacagaggagagcgtaagatataagcaatctcttgatgatgctgccaaaaccatccaggataaaaacaaggagatagaaaggttaaaacaactgatcgacaaagaaacaaatgaccggaaatgcctggaagatgaaaacgcgagattacaaagggtccagtatgacctgcagaaagcaaacagtagtgcgacggagacaataaacaaactgaaggttcaggagcaagaactgacacgcctgaggatcgactatgaaagggtttcccaggagaggactgtgaaggaccaggatatcacgcggttccagaactctctgaaagagctgcagctgcagaagcagaaggtggaagaggagctgaatcggctgaagaggaccgcgtcagaagactcctgcaagaggaagaagctggaggaagagctggaaggcatgaggaggtcgctgaaggagcaagccatcaaaatcaccaacctgacccagcagctggagcaggcatccattgttaagaagaggagtgaggatgacctccggcagcagagggacgtgctggatggccacctgagggaaaagcagaggacccaggaagagctgaggaggctctcttctgaggtcgaggccctgaggcggcagttactccaggaacaggaaagtgtcaaacaagctcacttgaggaatgagcatttccagaaggcgatagaagataaaagcagaagcttaaatgaaagcaaaatagaaattgagaggctgcagtctctcacagagaacctgaccaaggagcacttgatgttagaagaagaactgcggaacctgaggctggagtacgatgacctgaggagaggacgaagcgaagcggacagtgataaaaatgcaaccatcttggaactaaggagccagctgcagatcagcaacaaccggaccctggaactgcaggggctgattaatgatttacagagagagagggaaaatttgagacaggaaattgagaaattccaaaagcaggctttagaggcatctaataggattcaggaatcaaagaatcagtgtactcaggtggtacaggaaagagagagccttctggtgaaaatcaaagtcctggagcaagacaaggcaaggctgcagaggctggaggatgagctgaatcgtgcaaaatcaactctagaggcagaaaccagggtgaaacagcgcctggagtgtgagaaacagcaaattcagaatgacctgaatcagtggaagactcaatattcccgcaaggaggaggctattaggaagatagaatcggaaagagaaaagagtgagagagagaagaacagtcttaggagtgagatcgaaagactccaagcagagatcaagagaattgaagagaggtgcaggcgtaagctggaggattctaccagggagacacagtcacagttagaaacagaacgctcccgatatcagagggagattgataaactcagacagcgcccatatgggtcccatcgagagacccagactgagtgtgagtggaccgttgacacctccaagctggtgtttgatgggctgaggaagaaggtgacagcaatgcagctctatgagtgtcagctgatcgacaaaacaaccttggacaaactattgaaggggaagaagtcagtggaagaagttgcttctgaaatccagccattccttcggggtgcaggatctatcgctggagcatctgcttctcctaaggaaaaatactctttggtagaggccaagagaaagaaattaatcagcccagaatccacagtcatgcttctggaggcccaggcagctacaggtggtataattgatccccatcggaatgagaagctgactgtcgacagtgccatagctcgggacctcattgacttcgatgaccgtcagcagatatatgcagcagaaaaagctatcactggttttgatgatccattttcaggcaagacagtatctgtttcagaagccatcaagaaaaatttgattgatagagaaaccggaatgcgcctgctggaagcccagattgcttcagggggtgtagtagaccctgtgaacagtgtctttttgccaaaagatgtcgccttggcccgggggctgattgatagagatttgtatcgatccctgaatgatccccgagatagtcagaaaaactttgtggatccagtcaccaaaaagaaggtcagttacgtgcagctgaaggaacggtgcagaatcgaaccacatactggtctgctcttgctttcagtacagaagagaagcatgtccttccaaggaatcagacaacctgtgaccgtcactgagctagtagattctggtatattgagaccgtccactgtcaatgaactggaatctggtcagatttcttatgacgaggttggtgagagaattaaggacttcctccagggttcaagctgcatagcaggcatatacaatgagaccacaaaacagaagcttggcatttatgaggccatgaaaattggcttagtccgacctggtactgctctggagttgctggaagcccaagcagctactggctttatagtggatcctgttagcaacttgaggttaccagtggaggaagcctacaagagaggtctggtgggcattgagttcaaagagaagctcctgtctgcagaacgagctgtcactgggtataatgatcctgaaacaggaaacatcatctctttgttccaagccatgaataaggaactcatcgaaaagggccacggtattcgcttattagaagcacagatcgcaaccggggggatcattgacccaaaggagagccatcgtttaccagttgacatagcatataagaggggctatttcaatgaggaactcagtgagattctctcagatccaagtgatgataccaaaggattttttgaccccaacactgaagaaaatcttacctatctgcaactaaaagaaagatgcattaaggatgaggaaacagggctctgtcttctgcctctgaaagaaaagaagaaacaggtgcagacatcacaaaagaataccctcaggaagcgtagagtggtcatagttgacccagaaaccaataaagaaatgtctgttcaggaggcctacaagaagggcctaattgattatgaaaccttcaaagaactgtgtgagcaggaatgtgaatgggaagaaataaccatcacgggatcagatggctccaccagggtggtcctggtagatagaaagacaggcagtcagtatgatattcaagatgctattgacaagggccttgttgacaggaagttctttgatcagtaccgatccggcagcctcagcctcactcaatttgctgacatgatctccttgaaaaatggtgtcggcaccagcagcagcatgggcagtggtgtcagcgatgatgtttttagcagctcccgacatgaatcagtaagtaagatttccaccatatccagcgtcaggaatttaaccataaggagcagctctttttcagacaccctggaagaatcgagccccattgcagccatctttgacacagaaaacctggagaaaatctccattacagaaggtatagagcggggcatcgttgacagcatcacgggtcagaggcttctggaggctcaggcctgcacaggtggcatcatccacccaaccacgggccagaagctgtcacttcaggacgcagtctcccagggtgtgattgaccaagacatggccaccaggctgaagcctgctcagaaagccttcataggcttcgagggtgtgaagggaaagaagaagatgtcagcagcagaggcagtgaaagaaaaatggctcccgtatgaggctggccagcgcttcctggagttccagtacctcacgggaggtcttgttgacccggaagtgcatgggaggataagcaccgaagaagccatccggaaggggttcatagatggccgcgccgcacagaggctgcaagacaccagcagctatgccaaaatcctgacctgccccaaaaccaaattaaaaatatcctataaggatgccataaatcgctccatggtagaagatatcactgggctgcgccttctggaagccgcctccgtgtcgtccaagggcttacccagcccttacaacatgtcttcggctccggggtcccgctccggctcccgctcgggatctcgctccggatctcgctccgggtcccgcagtgggtcccggagaggaagctttgacgccacagggaattcttcctactcttattcctactcatttagcagtagttctattgggcactagtagtcagttgggagtggttgctataccttgacttcatttatatgaatttccactttattaaataatagaaaagaaaatcccggtgcttgcagtagagtgataggacattctatgcttacagaaaatatagccatgattgaaatcaaatagtaaaggctgttctggctttttatcttcttagctcatcttaaataagcagtacacttggatgcagtgcgtctgaagtgctaatcagttgtaacaatagcacaaatcgaacttaggatttgtttcttctcttctgtgtttcgatttttgatcaattctttaattttggaagcctataatacagttttctattcttggagataaaaattaaatggatcactgatattttagtcattctgcttctcatctaaatatttccatattctgtattaggagaaaattaccctcccagcaccagcccccctctcaaacccccaacccaaaaccaagcattttggaatgagtctcctttagtttcagagtgtggattgtataacccatatactcttcgatgtacttgtttggtttggtattaatttgactgtgcatgacagcggcaatcttttctttggtcaaagttttctgtttattttgcttgtcatattcgatgtactttaaggtgtctttatgaagtttgctattctggcaataaacttttagacttttgaagtgtttgtgttttaatttaatatgtttataagcatgtataaacatttagcatatttttatcataggtctaaaaatatttgtttactaaatacctgtgaagaaataccattaaaaaactatttggttctgaattcttact

SEQ ID NO: 48 - DNA, 933 bp, Homo sapiens
gcagagaggggcgcggggggcgggggtggtggggcttctggactgagccgctgagggtgcgggctgaccctgtaagtggctgcggcgggaagatggcggagctgcgcgtgctcgtagctgtcaagagggtcatcgactacgccgtgaagatccgagtgaagcctgacaggaccggtgtggtcacggatggtgtgaagcactccatgaaccccttctgtgagatcgcggtggaggaggctgtgcggctcaaggagaagaagctggtgaaggaggtcatcgccgtcagctgtgggcctgcacagtgccaggagacgattcgtaccgccctggccatgggtgcagaccgaggtatccacgtggaggtgcccccagcagaagcagaacgcttgggtcccctgcaggtggctcgggtcctggccaagctggcagagaaggagaaggtggacctggtgctgctgggcaaacaggccatcgatgatgactgtaaccagacagggcagatgacagctggatttcttgactggccacagggcacattcgcctcccaggtgacgctggagggggacaagttgaaagtggagcgggagatcgatgggggcctggagaccctgcgcctgaagctgccagctgtggtgacagctgacctgaggctcaacgagccccgctacgccacgctgcccaacatcatgaaagccaagaagaagaagatcgaggtgatcaagcctggggacctgggtgtggacctgacctccaagctctctgtgatcagtgtggaggacccgccccagcgcacggccggcgtcaaggtggagaccactgaggacctggtggccaagctgaaggagattgggcggatttgagcccctcccagagatggcaataaaactgactctcaacatctatctctgttaacttaaaaaaaaaaaaaaaaaa

SEQ ID NO: 49 - DNA, 3426 bp, Homo sapiens
gcgtgctgtgcggcgcggtctcagggaaggtggggctatggcagctgctagggaccctccggaagtatcgctgcgagaagccacccagcgaaaattgcggaggttttccgagctaagaggcaaacttgtagcacgtggagaattctgggacatagttgcaataacagcggctgatgaaaaacaggaacttgcttacaaccaacagctgtcagaaaagctgaaaagaaaggagttaccccttggagttcaatatcacgtttttgtggatcctgctggagccaaaattggaaatggaggatcaacactttgtgcccttcaatgtttggaaaagctatatggagataaatggaattcttttaccatcttattaattcactctggtggctacagtcaacgacttccaaatgcaagtgctctgggaaaaattttcactgctttacctcttggtaaccccatttatcagatgctagaattaaaactagccatgtacattgatttccccttaaatatgaatcctggaattctggttacctgtgcagatgatattgaactttatagtattggagaatttgagtttattaggtttgacaaacctggctttactgctttagctcatccttctagtttgacgataggtaccacacatggagtatttgtcttagatccttttgatgatttaaaacatagagaccttgaatacaggtcttgccatcgtttccttcataagcccagcatagaaaagatgtatcagtttaatgctgtgtgtagacctggaaatttttgtcaacaggactttgctgggggtgacattgccgatcttaaattagactctgactatgtctacacagatagcctattttatatggatcataaatcagcaaaaatgttacttgctttttatgaaaaaataggcacactgagctgtgaaatagatgcctatggtgactttctgcaggctttgggacctggagcaactgtggagtacaccagaaacacatcaaatgtcattaaagaagagtcagagttggtagaaatgaggcagagaatatttcatcttcttaaaggaacatcactaaatgttgttgttcttaataactccaaattttatcacattggaacaaccgaagaatatttgttttactttacctcagataacagtttaaagtcagagctcggcttacagtccataacttttagtatctttccagatataccagaatgctctggcaaaacatcctgtatcattcaaagcatactggattcaagatgttctgtggcacctggctcagttgtggagtattccagattggggcctgatgtttcagttggggaaaactgcattattagtggttcttacatcctaacaaaagctgccctccccgcacattcttttgtatgttccttaagcttaaagatgaatagatgcttaaagtatgcaactatggcatttggagtgcaagacaacttgaaaaagagtgtgaaaacattgtcagatataaagttacttcaattctttggagtctgtttcctgtcatgcttagatgtttggaatcttaaagttacagaggaactgttctctggtaacaagacatgtctgagtttgtggactgcacgcattttcccagtttgttcttctttgagtgactcagttataacatccctaaagatgttaaatgctgttaagaacaagtcagcattcagcctgaatagctataagttgctgtccattgaagaaatgcttatctacaaagatgtagaagatatgataacttacagggaacaaatttttctagaaatcagtttaaaaagcagtttgatgtagagatattttaaatattgtacactttgcctttttgagtaacattccagagataggtattttttgtaggctgtttcactgaactcagttaatgaaaactgtattaacataattgttgtagcataatattaatagtgcaaaagtacatataagtcattttgatgaaaaatattccaagactaagttgagaaaagagatactattttggatgtgtatcagtatttttgtttttaataatgattgatttgtggagcattgttttttcacataattagttttaaaggtaattttctaagcatacctttggaatttttccatcttttttgaggcttttggtccagtgaagttctaagtattcactggcacttctctcctcaactgtaattctatttttaataataaaaatggcatactgtagggtcttcagagtagtgtaggaatactgtagaaatactttttcagaaacgaatccatagctgacaaattcactcagtgcccaatatattgtgattattttcgttgataaagaactagatacaaagacctctgaaattgatgataaaatttgtatctcattaattttatcaaaatgaaactaaaagtacatatgtattatacacttgaacatgtgtttgtatatctttaaaattttcctttatgttccattccataggaaaacacacatatgcacacaaaactcagttatctgtggggaaagtggtagtaataattgagattcatcaataatcatataatttcactatagacattacttgcattatctcctatcagtccttctaacaaaacttcaattaccagatgaactgactttagttttcatcttattttttgtccacatgctggtgatgctgagaaacaataattggcccaaatgcagacatcaagaagcaggcaggaaaatggaaaaactgagataatacacaggtgataaacagtttcgagaaaataaaaattggctagaatctcaagttatgtgtttctatattggtataagcatataagtgaaaagtcttataagtgtaatagagaaaagatttgtcagtgtgtttttttaaatgaaataactagtctgtgctactttatgtcaatataaaaattggtaaactagaagtaacttgtccacaaccctcagttatgatacttatgtgcgtgtttttttttccaaagtttttcccaaggagaagatacaaatatatggtagctattgtttaaaaatgattgatttacttgcagatttttcagaggatgttatgtctttgtcattcattaaatgttcaaaattgtagttttaccaaatctgaagtgccatcagttataagaatcaccattattttatgttccattaagaaaaacacaataaaacatgacactgctttttttgttacttgaaattttcatatttattggagagctcttttagatgtttttaaatacagatttttatttaaccctcttgcatatacatataaaataacaaaaaaataaaatattgagatatcatcaagaaatttctacagcttcacattcaaactcttcagcactttcagagctattgatatgcatatgtccacctagtaccatcttct

SEQ ID NO: 50 - DNA, 2095 bp, Homo sapiens
gggcacctgcgcgttaagagtgggccgcgtcgctgaggggtagcgatgcgggctccggggatgaggtcgcggccggcgggtcccgcgctgttgctgctgctgctcttcctcggagcggccgagtcggtgcgtcgggcccagcctccgcgccgctacaccccagactggccgagcctggattctcggccgctgccggcctggttcgacgaagccaagttcggggtgttcatccactggggcgtgttctcggtgcccgcctggggcagcgagtggttctggtggcactggcagggcgaggggcggccgcagtaccagcgcttcatgcgcgacaactacccgcccggcttcagctacgccgacttcggaccgcagttcactgcgcgcttcttccacccggaggagtgggccgacctcttccaggccgcgggcgccaagtatgtagttttgacgacaaagcatcacgaaggcttcacaaactggccgagtcctgtgtcttggaactggaactccaaagacgtggggcctcatcgggatttggttggtgaattgggaacagctctccggaagaggaacatccgctatggactataccactcactcttagagtggttccatccactctatctacttgataagaaaaatggcttcaaaacacagcattttgtcagtgcaaaaacaatgccagagctgtacgaccttgttaacagctataaacctgatctgatctggtctgatggggagtgggaatgtcctgatacttactggaactccacaaattttctttcatggctctacaatgacagccctgtcaaggatgaggtggtagtaaatgaccgatggggtcagaactgttcctgtcaccatggaggatactataactgtgaagataaattcaagccacagagcttgccagatcacaagtgggagatgtgcaccagcattgacaagttttcctggggctatcgtcgtgacatggcattgtctgatgttacagaagaatctgaaatcatttcggaactggttcagacagtaagtttgggaggcaactatcttctgaacattggaccaactaaagatggactgattgttcccatcttccaagaaaggcttcttgctgttgggaaatggctgagcatcaatggggaggctatctatgcctccaaaccatggcgggtgcaatgggaaaagaacacaacatctgtatggtatacctcaaagggatcggctgtttatgccatttttctgcactggccagaaaatggagtcttaaaccttgaatcccccataactacctcaactacaaagataacaatgctgggaattcaaggagatctgaagtggtccacagatccagataaaggtctcttcatctctctaccccagttgccaccctctgctgtccccgcagagtttgcttggactataaagctgacaggagtgaagtaatcatttgagtgcaagaagaaagaggcgctgctcactgttttcctgcttcagtttttctcttatagtaccatcactataatcaacgaacttctcttctccacccagagatggcttttccaacacattttaattaaaggaactgagtacattaccctgatgtctaaatggaccaaagatctgagatccattgtgattatatctgtatcaggtcagcagaagaaggaactgagcagttgaactctgagttcatcaattgtaatatttggaaattatctacaatggaatcttccctctgttctctgataacctacttgcttactcaatgcctttaagccaagtcaccctgttgcctatgggaggaggtggaaggatttggcaagctcaaccacatgctatttagttagcatcagttgtcaccaacagtctttctgcaaagggcaggagagctttgggggaaaggaaaaggcttaccaggctgctatggtcaactcttcagaaattttcagagcaatctaaaagcgccaaaattcgctatgtttacagtgatactattaagaaaatgaatgtgattctgctctgtctttttaagtatgatcaaataaaaaatttgtacatcacaatcatttctaccaaaaaaaaaaaaaaaaaa

SEQ ID NO: 51 - DNA, 3923 bp, Homo sapiens
aaagagcccgctccgccgagcgccgggcgacggcaggaagcccctccgcttggccagaatggagcagccgaagggagttgattggacagtcatcatcctgacctgccagtacaaggacagtgtccaggtctttcagagagaactggaagtgcggcagaagcgggagcagatccctgctgggacgctgttactggccgtggaggacccagagaagcgtgtgggcagcggaggagccaccctcaacgccctgctggtggctgctgaacacctgagtgcccgggcaggcttcactgtggtcacatccgatgtcctgcactcggcctggatcctcattctgcacatgggtcgagacttcccctttgatgactgtggcagggctttcacctgcctccccgtggagaaccccgaggcccccgtggaagccttggtctgcaacctggactgcctgctggacatcatgacctatcggctgggcccgggctccccgccaggcgtgtgggtctgcagcaccgacatgctgctgtctgttcctgcaaatcctggtatcagctgggacagcttccggggagccagagtgatcgccctcccagggagcccggcctacgctcagaatcatggcgtctacctaactgacccccagggccttgttttggacatttactaccagggcactgaggcagagattcagcggtgtgtcaggcctgatgggcgggtgccactggtctctggggttgtcttcttctctgtggagactgccgagcgcctcctagccacccacgtgagcccgcccctggatgcctgcacctacctaggcttggactccggagcccggcctgtccagctgtctctgttttttgacattctccactgcatggctgagaacgtgaccagggaggacttcctggtggggaggcccccagagttggggcaaggcgatgcagatgtagcgggttatctgcagagcgcccgggcccagctgtggagggagcttcgcgatcagccccttaccatggcctatgtctccagcggcagctacagctacatgacctcctcagccagtgagttcctgctcagcctcacactccccggggctcctggggcccagattgtgcactcccaggtggaggagcagcagcttctggcggccgggagctctgtggtcagctgcctgctggagggccctgtccagctgggtcctgggagcgtcctgcagcactgccacctgcagggccccattcacataggcgctggctgcttggtgactggcctggatacagcccactccaaggccctgcatggccgggagctgcgtgaccttgtcctgcagggacaccacacgcggctacacggctccccgggccacgccttcaccctcgttggccgtctggacagctgggagagacagggggcaggcacatatctcaacgtgccctggagtgaattcttcaagaggacaggtgttcgagcctgggacctgtgggaccctgagacgctgcccgcagagtactgccttcccagcgcccgcctctttcctgtgctccacccctcgagggagctgggaccccaggacctgctgtggatgctggaccaccaggaggatgggggcgaggccctgcgagcctggcgggcctcctggcgcctgtcctgggagcagctgcagccgtgcctggatcgggctgccacgctggcctctcgccgggacctgttcttccgccaggccctgcataaggcgcggcacgtgctggaggcccggcaggacctcagcctgcgcccgctgatctgggctgctgtccgcgagggctgccccgggcccctgctggccacgctggaccaggttgcagctggggcaggagaccctggtgtggcggcacgggcactggcctgtgtggcggacgtcctgggctgcatggcagagggccgtgggggcttgcggagcgggccagctgccaaccctgagtggatgcggcccttctcatacctggagtgtggagacctggcagcgggcgtggaggcgcttgcccaggagagggacaagtggctaagcaggccagccttgctggtgcgagcggcccgccactatgagggggctggtcagatcctgatccgccaggctgtgatgtcagcccagcactttgtctccacagagcaggtggaactgccgggacctgggcagtgggtggtggctgagtgcccggcccgtgtggatttctctgggggctggagtgacacgccaccccttgcctatgagcttggcggggctgtgctgggcctggctgtgcgagtggacggccgccggcccatcggagccagggcacgccgcatcccggagcctgagctgtggctggcggtggggcctcggcaggatgagatgactgtgaagatagtgtgccggtgcctggctgacctgcgggactactgccagcctcatgccccaggggccctgctgaaggcggccttcatctgtgcagggatcgtgcatgtccactcggaactccagctgagtgagcagctgctccgcaccttcgggggcggctttgagctgcacacctggtctgagctgccccacggctctggcctgggcaccagcagcatcctggcaggcactgccctggctgccttgcagcgagccgcaggccgggtggtgggcacggaagccctgatccacgcagtgctgcacctggagcaggtgctcaccactggaggtggctggcaggaccaagtaggtggcctaatgcctggcatcaaggtggggcgctcccgggctcagctgccactgaaggtggaggtagaagaggtcacggtgcctgagggctttgtccagaagctcaatgaccacctgctcttggtgtacactggcaagacccgcctggctcggaacctgctgcaggatgtgctgaggagctggtatgcccgacttcctgctgtggtgcagaatgcccacagcctggtacggcaaactgaggagtgtgctgaaggcttccgccaaggaagcctgcctctgctgggccagtgcctgacctcgtactgggagcagaagaagctcatggctccaggctgtgagcccctgactgtgcggcgtatgatggatgtcctggccccccacgtgcatggccagagcctggctggggcaggcggtggaggctttctctatctgttgaccaaggagccacagcaaaaggaggccttggaggcggtgctggccaagaccgagggccttgggaattacagcatccacctggttgaagtggacactcagggcctgagcctgaagctgctggggaccgaggcctcaacctgttgccctttcccatgaagctggcttctctctgcaacaggagaaaacctggagctacagtgtcccccaccttccttgccccatgggaacctccacctcctactccccacccacctctgcgaatctgctcccaaaggaagctgaccagagcaagatctgggcaagcagagagtgcctgggacaggactgtgacctggtggacaggggcctagatgtagcctctgttcctcctggacataggaaggtcccaagcttagtatcccacgtggcctttacaaatcctatggctggccttctcattccacaagggccctggaaagggttgacagccagccttggcatatggctgggagtcccttagcaaggccaaccctgaagaggccctttgaggcattccctatggcttagagttgtagacttacactcaaccctcatgtgagcgtgggagtgagggtggcggtcccttgccaagttggtagcagtgacccagtgattcactgccatcccaggccttaactagcaaaactacggagcgtgccaagtgacctggtgcctgtgggaagtgggttctcaggactggcattcttggaataaattcactctgtccttgcaaaaaaaaaaaaaaaaa

SEQ ID NO: 52 - DNA, 4244 bp, Homo sapiens
gaaagtccctgactggagttggcagccaagccaggccctggagtgggcacccagagggaagacaggttggctaatttcctggagcccctaagggtgcaagggggaagaacacccacccgcaaagccccgtagctggaccctacgttagcctgccctgctcggggttggcgatgctggaggtgggccttggaccagagaaaatgctttaattaggtgacaagcgggcagaggcctttgtctctggagccggcagccacggcccccgctgacggcgtgggaaacagaccctgttccactccggtctccagccttggaatggttgccttcgtgcagtgcaggaggacgcggcagagggcggacgatcgctccactcgccgggaccaggtgcgggggccctgcccagccgctggggcgtggccaggctcgaagcacccaggtgtcgggggccgactctaagccctggcaccggaagagagagggcggcggattggacctcccggctccagcattgcaactgggcgctccgtctcctggtccacgcaatgatggtgcggctgctcagaagccaggtagcctgccctgggtgaagccttcgcgcaggtcaatgacggggcggaggggcagggcgcggtcccctgcatccccgatctggggagcggtgggcccaggggccatcgccttagcccctggcgctggggctcggcgccaagtgacgggcggggctccaccttccagccatccgcccggcccgggagggcggacgctgcgagactcccggccgcgccctctccttcctctcctccccaagccctcgctgccagtccggacaggctgcgcggaggggagggctgccgggccggatagccggacgcctggcgttccaggggcggccggatgtggcctgcctttgcggagggtgcgctccggccacgaaaagcggactgtggatctgccacctgcaagcagctcggccatgtggctccggagccatcgtcagctctgcctggccttcctgctagtctgtgtcctctctgtaatcttcttcctccatatccatcaagacagctttccacatggcctaggcctgtcgatcctgtgtccagaccgccgcctggtgacacccccagtggccatcttctgcctgccgggtactgcgatgggccccaacgcctcctcttcctgtccccagcaccctgcttccctctccggcacctggactgtctaccccaatggccggtttggtaatcagatgggacagtatgccacgctgctggctctggcccagctcaacggccgccgggcctttatcctgcctgccatgcatgccgccctggccccggtattccgcatcaccctgcccgtgctggccccagaagtggacagccgcacgccgtggcgggagctgcagcttcacgactggatgtcggaggagtacgcggacttgagagatcctttcctgaagctctctggcttcccctgctcttggactttcttccaccatctccgggaacagatccgcagagagttcaccctgcacgaccaccttcgggaagaggcgcagagtgtgctgggtcagctccgcctgggccgcacaggggaccgcccgcgcacctttgtcggcgtccacgtgcgccgtggggactatctgcaggttatgcctcagcgctggaagggtgtggtgggcgacagcgcctacctccggcaggccatggactggttccgggcacggcacgaagcccccgttttcgtggtcaccagcaacggcatggagtggtgtaaagaaaacatcgacacctcccagggcgatgtgacgtttgctggcgatggacaggaggctacaccgtggaaagactttgccctgctcacacagtgcaaccacaccattatgaccattggcaccttcggcttctgggctgcctacctggctggcggagacactgtctacctggccaacttcaccctgccagactctgagttcctgaagatctttaagccggaggcggccttcctgcccgagtgggtgggcattaatgcagacttgtctccactctggacattggctaagccttgagagccagggagactttctgaagtagcctgatctttctagagccagcagtacgtggcttcagaggcctggcatcttctggagaagcttgtggtgttcctgaagcaaatgggtgcccgtatccagagtgattctagttgggagagttggagagaagggggacgtttctggaactgtctgaatattctagaactagcaaaacatcttttcctgatggctggcaggcagttctagaagccacagtgcccacctgctcttcccagcccatatctacagtacttccagatggctgcccccaggaatggggaactctccctctggtctactctagaagaggggttacttctcccctgggtcctccaaagactgaaggagcatatgattgctccagagcaagcattcaccaagtccccttctgtgtttctggagtgattctagagggagacttgttctagagaggaccaggtttgatgcctgtgaagaaccctgcagggcccttatggacaggatggggttctggaaatccagataactaaggtgaagaatctttttagttttttttttttttttttggagacagggtctcgctctgttgcccaggctggagtgcagtggcgtgatcttggctcactgcaacttccgcctcctgtgttcaagcgattctcctgtctcagcctcctgagtagatgggactacaggcacaggccattatgcctggctaatttttgtatttttagtagagacagggtttcaccatgttggccaggatggtctcgatctcctgaccttgtcatccacctgtcttggcctcccaaagtgctgggattactggcatgagccactgtgcccagcccggatattttttttttaattatttatttatttatttatttattgagacggagtcttgctctgtagcccaggccagagtgcagtggcgcgatctcagctcactgcaagctctgcctcccgggttcatgccattctgcctcagcctcctgagtagctgggactacaggcgcccgccaccacgcccggctaattttttttgtatttttagtagagacggggtttcatcgtgttaaccaggatggtctcgatctcctgacctcgtgatctgcccacctcggcctcccacagtgctgggattaccggcgtgagccaccatgcctggcccggataattttttttaatttttgtagagacgaggtcttgtgatattgcccaggctgttcttcaactcctgggctcaagcagtcctcccaccttggcctcccagaatgctgggtttatagatgtgagccagcacaccgggccaagtgaagaatctaatgaatgtgcaacctaattgtagcatctaatgaatgttccaccattgctggaaaaattgagatggaaaacaaaccatctctagttggccagcgtcttgctctgttcacagtctctggaaaagctggggtagttggtgagcagagcgggactctgtccaacaagccccacagcccctcaaagacttttttttgtttgttttgagcagacaggctaaaatgtgaacgtggggtgagggatcactgccaaaatggtacagcttctggagcagaactttccagggatccagggacacttttttttaaagctcataaactgccaagagctccatatattgggtgtgagttcaggttgcctctcacaatgaaggaagttggtctttgtctgcaggtgggctgctgagggtctgggatctgttttctggaagtgtgcaggtataaacacaccctctgtgcttgtgacaaactggcaggtaccgtgctcattgctaaccactgtctgtccctgaactcccagaaccactacatctggctttgggcaggtctgagataaaacgatctaaaggtaggcagaccctggacccagcctcagatccaggcaggagcacgaggtctggccaaggtggacggggttgtcgagatctcaggagccccttgctgttttttggagggtgaaagaagaaaccttaaacatagtcagctctgatcacatcccctgtctactcatccagaccccatgcctgtaggcttatcagggagttacagttacaattgttacagtactgttcccaactcagctgccacgggtgagagagcaggaggtatgaattaaaagtctacagcactaa

SEQ ID NO: 53 - DNA, 3549 bp, Homo sapiens
gtcttcccggcgcccaggcttgggctcatagggagaaaggaagctgcgctgcattctgcgggacgaaccctgctccgcgcgagaatttttttgattccttcttatttggagaaatctccagctgctctgatgatagcctaagaagactgcatgctgcttcctctcgatgccaagccagaccctctcacaacctcggatctcagtccttcatggagacctggtcccagcaggaatggcagtgcaggaaattggcgcccagatggttcttccatgtgaagttgtctcgggctctgggctgacgagagaacacctggtaaccaggttagccctctgtcagtcacccagggcagggcagcatggtgcggattcagaggaggaagcttttggcatcttgcctgtgcgtcacagccaccgtctttctgcttgtcacactccaggtcatggttgagctggggaagtttgaaaggaaggagtttaaaagttccagtttgcaagatggacatacaaaaatggaggaagcacctacgcatcttaattcatttcttaagaaagaaggattgaccttcaacaggaaaagaaaatgggaattggacagctaccccattatgctctggtggtccccgctgacgggggagactgggaggttaggccaatgtggagcagatgcttgtttcttcaccatcaaccggacctacctccatcatcacatgaccaaagcattcctcttctatggtactgactttaacatagatagcttacctctgcctcggaaagcccatcatgactgggctgtttttcatgaagagtccccgaaaaacaattataagctctttcataaaccagtgatcaccttgttcaactacactgccacgttcagcaggcattcccacttgccactaactacccaatacttggagagcattgaagtcctgaagtcactccgatacctagttcctttgcagtccaaaaacaagcttagaaaaagacttgctccgctggtgtatgtacagtcagactgtgacccaccatcagacagggacagctatgttcgcgagctgatgacttacatcgaggtcgattcctatggtgaatgtttacgaaacaaagacctccctcagcagctgaaaaatccagcctctatggatgccgatggcttttataggatcattgcacagtataagtttatcctagcttttgagaatgcagtttgtgatgactacatcactgagaagttctggaggccactgaaactgggggtagtccctgtatattacggatcccccagcatcacagactggcttccaagtaacaaaagtgctattcttgtatcagaattttctcaccccagggaactggcaagttacatcagacgactggattctgatgacagattgtatgaggcctatgtagaatggaagctgaagggtgagatctctaaccagcgacttctgacagctctcagggaacggaaatggggagtgcaagacgtcaaccaggacaattacatcgatgcatttgagtgtatggtgtgcaccaaggtgtgggctaatatcaggcttcaggaaaagggcttaccacccaaaagatgggaggcagaagatacccacctgagttgcccagagcccacagtgtttgctttctcaccactccggactccacctttgagctctttgcgagagatgtggatttccagctttgaacaatccaagaaagaagcccaggcactaaggtggctggttgataggaatcaaaacttttcatctcaagagttttggggcctagtattcaaggactgatttcaaaaatgatcagaatgaaacagactagagccttcttgaggtttattttctaggttgccttaatatttgaacataatagctattctgttgactatccatcaggataataattagttgctgcagtactcataatgagccctttcaaggaatagatgtaaattacccttaggggtagccactatattttttatactaaaaaaggaaatatttcttatggacactggttatcttccatgtccgtgtctgtggacccacatacttactgccttttgtggaaattcacctagagtgagtactttccttgtgcaatggagggagacgatctagctatagattcttgatactcacctcactctcaacagcttattggtatttggcaaacctggtatcctgcagccgagcatgaacatgaaatacattagaacttggcaatgagagatcccatctgttggtttccagggatgtaagtgagtaataaaagctgtttcaagtttatccactatccactcttcaagtgaaaagaacttatgtgtgtctaccttcttctccataccctgagccacctctctcactttctttagttgtgccttgccctatcgcctcccattttcccttcaaagtagaatgtcttgtaaagacacagtaactcctgtgtgttttgattagtgagatgttaccacttaccccttctgctgcgcagaataatattaagaattgctatgcttatgattcaggctggacagcctggacattttgagcagcgcgagagtagaagtgaatacccccaggaactccaattgtgctgaagctgatttgtctgttcgtaggatgatgtgcagcctgtcacagtggcagccacaggcattcagtttgtgggcatttcctgtcatttcggatcctgctatagggaaggttcagctctcctgtctggggcatctactggagcacctcagaagacaaggaggaaaacactggctcatgttttctttccatgtgagggaggggaggtttctagatgatactaaaagcctgttgccactgttgtgtcatgatttccattcttcatcatggaaagccacaagcctcagaaggcagccagaggacaggaagagtctgtgatgctcatgtctgtgtcatggcatgagggggaattgacgagtgcttgcttagcatcagctctcattgtattgaaggctgtgcccttggtgtgcttagcagtgagcagcgtcttcattaggtagctctggctgggctttgtcagccagcgtgtgagaaaggagaaccaaaaccaatacctccttatagaagccagaaggatcacattggatgagagaaggtgtctataactgggttcttcccaatcccagctctttcattaactaaatatgatcttggacatatctcttaacctccatcggccttagtttttgcatccaaaaagaagtgattgggctggtcttggaaggtttttttcttttttttcccctgtgtaacattcttcattgttcatcaacatttaagaaatttaattttgtagatgtttttactaaagagggtaacaaactattttggaactgctgtatgttattcaagggaagcacgctgtttggaggaaggagcatacttaatgggtagtattgaggatgaaagggaatttctctctctgccattttatttgataatattaaagaaataaagactggaaagggggattccttgttaaaggtcagattttaaattgcatataaaa

SEQ ID NO: 54 - DNA, 2069 bp, Homo sapiens
ggggtcggtgctggccgagggggcgccggctgccggagtggacatggcggccggccccattagggtggtgttggtccttctaggggtgctcagtgtctgtgcagccagcggccatgggtccgtagcggagagggaggccggcggggaggcggagtgggcggaaccgtgggatggcgcggttttccggccgccctcggcgctgggcgcagtgggggtgacgcgcagctctgggacgccgcggccagggagggaggaggcgggggacttgccggtactgctgtggtggagcccagggctattcccccacttcccgggagactcggagcgcatcgagtgtgcgcgcggcgcgtgcgtggcgtcccggaaccgccgagcgctgagggactcgcggacgcgcgcgctgctcttctacggcacagacttccgcgcgtcggccgccccgctgccgcgcctggcgcaccagagctgggcgctcctccacgaggagtcgcccctcaacaacttcttgctgagccacggcccgggcatccgcctcttcaatcttacctccaccttcagtcgccactcggattacccgctgtcgctgcagtggctgcccgggaccgcctatctgcgccgcccggtgcctccgcccatggaacgcgcggagtggcgccgccgcggctacgcgccgctgctctatctgcagtcacactgcgacgtgccagcggaccgggaccgctacgtgcgcgagctcatgcgccacatcccggtagactcctacgggaaatgcctgcagaatcgggagctgcctaccgcgcggctacaggacacagccacggccaccaccgaggatccagagctcttggctttcttgtcccgctataagttccacttggccctggaaaatgccatctgtaacgactacatgacagaaaaactgtggcgtcccatgcacctgggcgctgtgcccgtgtaccgcggttctccctctgtgagggactggatgccgaacaatcactccgtcatcctgattgatgattttgagtctcctcagaagctggcagagtttattgactttctggacaagaatgatgaggagtatatgaaatacctggcatacaagcaacctgggggcatcaccaaccaatttcttctggatagtctgaagcatcgggagtggggagtgaatgatcctttgctgcctaactacctcaacggcttcgagtgtttcgtctgtgactacgaactggctcggctggatgccgagaaagcccacgcggcctctcccggggacagccccgtctttgagccccacattgcccagccctcacacatggactgcccagtgcccacacctggctttggcaatgtggaagagattcctgagaatgacagttggaaagagatgtggctgcaagattattggcaaggtctggaccagggggaagctctcactgccatgatccacaacaatgaaacagagcagacgaaattttgggattacctacatgaaatcttcatgaagaggcaacatctctaagtgcccttgcaagagcctttaacttggcggagctaaggagatcttattctaccatgggacataaggagcatccactgcacaaacccttaatgaacactgtcttttcatggattcaaggaattccagttttatctattaagattttatcttaatgatgagtagccaaggtctaacatagggcctctcctcaaggagagatggagggatacaattcttggttcagtgggaaacagaaccctaaaacatccatttgattcaaggtgctggtccaacagagtttttaaactactcacttctttatttcatcctttcgactgtacttgattaccagtgaagtaagatgggtcaggttacgacttacaacttttgttctattccccagactcctcattattcagtacatttcccaataatctctttttctcatctcttgctttataaattgttacgttggtggagaagcaaaacatttggtgagttgtattctggttttccggagttggatttttttatattatatactttcatgtcaaaaaaaaaaaaaaaa

SEQ ID NO: 55 - DNA, 3088 bp, Homo sapiens
gctggaagggtttctttggccctgagtgaagagagacccagagggaacactgaggtgcctgcccaaccactctgtcccggtttccttcagcaggaccaggtgagagaagccatgctggtcgttcagatgcctttctcctttcccatggcccacttcatcctctttgtctttacggtttccactatatttcacgttcagcagcggctagcgaagattcaagccatgtgggagttaccggtgcagataccagtgctagcctcaacatcaaaggcactgggacccagccagctcagggggatgtggacgatcaatgcaataggccgcctggggaaccagatgggcgagtacgccacactgtacgccctggccaagatgaacgggcggcccgccttcatcccggcccagatgcacagcaccctggcccccatcttcagaatcaccctgccggtgctgcacagcgccacggccagcaggatcccctggcagaactaccacctgaacgactggatggaggaggaataccgccacttcccgggggagtacgtccgcttcaccggctacccctgctcctggaccttctaccaccacctccgccaggagatcctccaggagttcaccctgcacgaccacgtgcgggaggaggcccagaagttcctgcggggcctgcaggtgaacgggagccggccgggcacctttgtaggggtccatgttcgccgaggggactatgtccatgtcatgccaaaagtgtggaagggggtggtggccgaccggcgatacctacagcaggccctggactggttccgagctcgctacagctccctcatcttcgtggtcaccagtaatggcatggcctggtgtcgggagaacattgacacctcccacggtgatgtggtgtttgctggcgatggcattgagggctcacctgccaaagattttgctctactcacacagtgtaaccacaccatcatgaccattgggacgttcgggatctgggccgcatacctcacgggcggagacaccatctacctggccaattacaccctccccgactcccctttcctcaaaatctttaagccagaggcagccttcctgccggagtggacagggattgccgcagacctgtcccccttactcaagcactaatgctggcccattctttgagaccttttctccttctctgcctccctcaagatgagtgcccgggcatgagaagcacatggttccatgagcaggacccatctctcttctgtgaagatgcgttgggctgcaagtaacagaaatctcagtgaacagtggcctggcgtggtggctcatgcctgtaatgctcgcactttgggaggccagggtgggtggatcacttgaggtcaggagttcaagactagcctggccaacatggtgaaaccccatctcgactaaaaatacaaaaattagccaggcgtggtggtgcacacttgtaatcccagctactcgggaggctgaggcaagagaatcacttgaacccaggaggcggaggttgcagtgagccaagatggtgccgctgcactccagcctgggtgacacagcaagactccatctcaaaaaaaaaaaaagaaaaagaaatgaacgggttcaaagaccataatcatgcatatcacataagaccagaagtggcccaggtccagggtcagttaatttagcagctccacaaagtcatcagtcacctgagctccatccatcttcacatgctgtgctaccatttcttagctgtatcatcccatggtcccaaaagggctgctacacatccagccatcacatgcagataattcctttcaaaaacagcagaaagaggctcgttcttgtcttggtcccttttgaagaatgaatgaaaccttcctaagccttccagcaatttccccccaactccgatgggtaggaattgtcacatacccatgtgacccgataggaggcaaaagaaatgagacttctgggattagtttagcctcagattctgcagctgagaagttgatcagccacctctgaaggacatgcagcttgcagaaaattagggtggtgttaccaaggtgaaaaggggaaatggctttagagtagacaacagagatgccctgaggggttgtgtaggttgttcactgcaggaagtcccctggttaagaaggcaagtggggtttaaacagacccacagtctactcatcaaaccaggtgtccttggcattgtgtccacccagagagctcactgttttcttttctttttcttttctttttttttttttgagatggagtcttgctgcatcccccaggctggagtgcagtggcatgatcttggctcactgcagcctccgcctcccaggttcaggcgattctcctgcctcagcctcccgagtggctgggattgcaggtgcgtgccaccacgcccagctaattttgtacgtttagtggaaatggagtttcaccatgttggtcaggctggtctcaaactcctgacctcatgatccgccttcctcggcctcccaaggtgctgggattacaggtgttagccactgcgcccggccctagagctcactgttttctagttagtccatctggaagtggagcctttttccagtttgcacaaatgtgccatattggcttgtagctggcatgcatccaagtccataggtcctgcctcttcaatcctggctttctagggcctgggatgatcattgctagaactgagagaccagcctggctgagtgaacttcagggcgttccgttcattctttcagtaaatggttgcagcacatgttttacatgtcaggcagtgaaaccccccacagcagccttccctctcagaggatacatttgtaaccattacacagtcatcaaaggaataattttttttaatcaccagtgtgcatacagtcatggagctgggtattcccagctaccagggaggctgaggtgggaggattgcttgatgccaggagttagggaatatagtgcaccgtgattggacttgcgaatagccactgcactgcggcctggacgacgtagtgataccctgactcttataaataaataaatgaataaacacaattatgactttgcggatggg

SEQ ID NO: 56 - DNA, 2581 bp, Homo sapiens
gttcccacttcctcccgccccaggaaacctgccatggcctcctggtgagctgtcctcatccactgctcgctgcctctccagatcttcagttgcttcaggccactttgaatgtatatgagccggtcgtaggggatatcgatggcttagcttgggctcagaggcctgaaaatcgcccccaccaatcacctgtttcccccaatctaccctcctgaaggtcactgacaaagacttcattgtctcctaggagaggctgccatatatcagggctgacgtaattccatcttaatatcagttacattataaaaatttacctcgtgcctgaggccccagagcccaagggtgcaaagcagtaattagtcaaagttcaacttcccctcccactctgggctcaggctgtccctgagggcctgtgttttgagtctctttccagaaccttggtgtgaacttaggtcttggcgtcgggatcccttttcgtcacactcaggtgacctacaggctccgctcgacactgcaaggcttagaccagttcggtccaacagagaaagcaggcaaccaccatgtcatttgaaaacagtttcatcgggatataattcgcaacccatacagtgaatccatttaagatactctgacccatggatcccctgggtgcagccaagccacaatggccatggcgccgctgtctggccgcactgctatttcagctgctggtggctgtgtgtttcttctcctacctgcgtgtgtcccgagacgatgccactggatcccctagggctcccagtgggtcctcccgacaggacaccactcccacccgccccaccctcctgatcctgctatggacatggcctttccacatccctgtggctctgtcccgctgttcagagatggtgcccggcacagccgactgccacatcactgccgaccgcaaggtgtacccacaggcagacacggtcatcgtgcaccactgggatatcatgtccaaccctaagtcacgcctcccaccttccccgaggccgcaggggcagcgctggatctggttcaacttggagccaccccctaactgccagcacctggaagccctggacagatacttcaatctcaccatgtcctaccgcagcgactccgacatcttcacgccctacggctggctggagccgtggtccggccagcctgcccacccaccgctcaacctctcggccaagaccgagctggtggcctgggcggtgtccaactggaagccggactcagccagggtgcgctactaccagagcctgcaggctcatctcaaggtggacgtgtacggacgctcccacaagcccctgcccaaggggaccatgatggagacgctgtcccggtacaagttctacctggccttcgagaactccttgcaccccgactacatcaccgagaagctgtggaggaacgccctggaggcctgggccgtgcccgtggtgctgggccccagcagaagcaactacgagaggttcctgccacccgacgccttcatccacgtggacgacttccagagccccaaggacctggcccggtacctgcaggagctggacaaggaccacgcccgctacctgagctactttcgctggcgggagacgctgcggcctcgctccttcagctgggcactggatttctgcaaggcctgctggaaactgcagcaggaatccaggtaccagacggtgcgcagcatagcggcttggttcacctgagaggccggcatggtgcctgggctgccgggaacctcatctgcctggggcctcacctgctggagtcctttgtggccaaccctctctcttacctgggacctcacacgctgggcttcacggctgccaggagcctctcccctccagaagacttgcctgctagggacctcgcctgctggggacctcgcctgttggggacctcacctgctggggacctcacctgctggggaccttggctgctggaggctgcacctactgaggatgtcggcggtcggggactttacctgctgggacctgctcccagagaccttgccacactgaatctcacctgctggggacctcaccctggagggccctgggccctggggaactggcttacttggggccccacccgggagtgatggttctggctgatttgtttgtgatgttgttagccgcctgtgaggggtgcagagagatcatcacggcacggtttccagatgtaatactgcaaggaaaaatgatgacgtgtctcctcactctagaggggttggtcccatgggttaagagctcaccccaggttctcacctcaggggttaagagctcagagttcagacaggtccaagttcaagcccaggaccaccacttatagggtacaggtgggatcgactgtaaatgaggacttctggaacattccaaatattctggggttgagggaaattgctgctgtctacaaaatgccaagggtggacaggcgctgtggctcacgcctgtaattccagcactttgggaggctgaggtaggaggattgattgaggccaagagttaaagaccagcctggtcaatatagcaagaccacgtctctaaataaaaaataataggccggccag

SEQ ID NO: 57 - DNA, 5937 bp, Homo sapiens
ctgctcctgcgcggcagctgctttagaaggtctcgagcctcctgtaccttcccagggatgaaccgggccttccctctggaaggcgagggttcgggccacagtgagcgagggccagggcggtgggcgcgcgcagagggaaaccggatcagttgagagagaatcaagagtagcggatgaggcgcttgtggggcgcggcccggaagccctcgggcgcgggctgggagaaggagtgggcggaggcgccgcaggaggctcccggggcctggtcgggccggctgggccccgggcgcagtggaagaaagggacgggcggtgcccggttgggcgtcctggccagctcaccttgccctggcggctcgccccgcccggcacttgggaggagcagggcagggcccgcggcctttgcattctgggaccgcccccttccattcccgggccagcggcgagcggcagcgacggctggagccgcagctacagcatgagagccggtgccgctcctccacgcctgcggacgcgtggcgagcggaggcagcgctgcctgttcgcgccatgggggcaccgtggggctcgccgacggcggcggcgggcgggcggcgcgggtggcgccgaggccgggggctgccatggaccgtctgtgtgctggcggccgccggcttgacgtgtacggcgctgatcacctacgcttgctgggggcagctgccgccgctgccctgggcgtcgccaaccccgtcgcgaccggtgggcgtgctgctgtggtgggagcccttcggggggcgcgatagcgccccgaggccgccccctgactgccggctgcgcttcaacatcagcggctgccgcctgctcaccgaccgcgcgtcctacggagaggctcaggccgtgcttttccaccaccgcgacctcgtgaaggggccccccgactggcccccgccctggggcatccaggcgcacactgccgaggaggtggatctgcgcgtgttggactacgaggaggcagcggcggcggcagaagccctggcgacctccagccccaggcccccgggccagcgctgggtttggatgaacttcgagtcgccctcgcactccccggggctgcgaagcctggcaagtaacctcttcaactggacgctctcctaccgggcggactcggacgtctttgtgccttatggctacctctaccccagaagccaccccggcgacccgccctcaggcctggccccgccactgtccaggaaacaggggctggtggcatgggtggtgagccactgggacgagcgccaggcccgggtccgctactaccaccaactgagccaacatgtgaccgtggacgtgttcggccggggcgggccggggcagccggtgcccgaaattgggctcctgcacacagtggcccgctacaagttctacctggctttcgagaactcgcagcacctggattatatcaccgagaagctctggcgcaacgcgttgctcgctggggcggtgccggtggtgctgggcccagaccgtgccaactacgagcgctttgtgccccgcggcgccttcatccacgtggacgacttcccaagtgcctcctccctggcctcgtacctgcttttcctcgaccgcaaccccgcggtctatcgccgctacttccactggcgccggagctacgctgtccacatcacctccttctgggacgagccttggtgccgggtgtgccaggctgtacagagggctggggaccggcccaagagcatacggaacttggccagctggttcgagcggtgaagccgcgctcccctggaagcgacccaggggaggccaagttgtcagctttttgatcctctactgtgcatctccttgactgccgcatcatgggagtaagttcttcaaacacccatttttgctctatgggaaaaaaacgatttaccaattaatattactcagcacagagatgggggcccggtttccatattttttgcacagctagcaattgggctccctttgctgctgatgggcatcattgtttaggggtgaaggagggggttcttcctcaccttgtaaccagtgcagaaatgaaatagcttagcggcaagaagccgttgaggcggtttcctgaatttccccatctgccacaggccatatttgtggcccgtgcagcttccaaatctcatacacaactgttcccgattcacgtttttctggaccaaggtgaagcaaatttgtggttgtagaaggagccttgttggtggagagtggaaggactgtggctgcaggtgggactttgttgtttggattcctcacagccttggctcctgagaaaggtgaggagggcagtccaagaggggccgctgacttctttcacaagtactatctgttcccctgtcctgtgaatggaagcaaagtgctggattgtccttggaggaaacttaagatgaatacatgcgtgtacctcactttacataagaaatgtattcctgaaaagctgcatttaaatcaagtcccaaattcattgacttaggggagttcagtatttaatgaaaccctatggagaatttatccctttacaatgtgaatagtcatctcctaatttgtttcttctgtctttatgtttttctataacctggattttttaaatcatattaaaattacagatgtgaaaataaagcagaagcaacctttttccctcttcccagaaaaccagtctgtgtttacagacagaagagaaggaagccatagtgtcacttccacacaattatttatttcatgtctttactggacctgaaatttaaactgcaatgccagtcctgcaggagtgctggcattaccctctgcagaacagtgaaaggtattgcactacattatggaatcatgcaaaaggaaaaaaagtttcatgatatctgttgttggcagtttttgtttatctctgacagtttttagttaaatgtttagatcctcagaactacattagtgcctactattaacttactctgtctcttgttaaaggctaaatctgcgcttctccctggtgccagcaggttcccctcacagtcaatgcagtggtatagcatatcctcacatttctagtgcccttgagactgtgctatggaaccaatcttgaacatacatgcattgacttgacaagttactgagtaagcagcatattcagcaggtgccactacatgcctactctgccagacactgagcttggggccctagggaagatagagaattatacaaggcaaagtccttctctttagggctcttacaatctatcacttccaaaaagtaaatggtgactgataaaacaattggcagaacctgtttgattactgtgacagtcttaatgataccataaatcaatattagaaagctagttgacttaaagcctgaaataatgggagttttctcctccacttattagaataaggaccctcagtgactaattattgtgggtagggtcaagattaactagttttatacagagttctgctgtaaatagtcattttgcatttgattagtgcagttctctgaatcataaagcaagttttacctctctgtacatgtttttgcagacatacttgaaaagctcacttaaatctaggtgcttcaattcactttcttgagaggacaaatgaaaagctgtggagaaaatgtcctcattaaagtattaaagtgtgggcagaattacaattacaaagtgccagccaccgaataaagataaaagttcagttcttaaaatgagtttttatgagataacagtcagtgatcttggtgttaccgggattccacatggggcagtgggaaagagttcaggttttgaaggtaacctagtttagatttgaattccagctatgtgacattgggtaaattagtagtagtcctgagcctcagcgtcctcatctataaaatgactggcgaaaatacttcacaagctcattttgagcactttaggaagtaagtgaaagtacctaaaatagcaggcacccaattgatgattttatatcttccttctttgcttgcagtgatttcaggatgtcctcatatctatttataggtctaaaattatatcttaaggtatgttgtagaataaattaaaaggataatctaaatcaccatttagattaagcttgacttgcaaactaggaagaagcacctaggctttctttgaaaatatttttttggttcgttttggtaaagctctataaattggtatctattattttaccaatttttttttagtattaagtccatttagaactaaccatattatttatggaataattagcatgaggaaggtataattgcattttttttttttttagacggagcttgcactgtagccccagctggactgcagtggcgtgatcttggctcactgcaacctccgcctcccaggttcaagcgattctcctgcctcagcctcccgagcagctgagactacaggcgcctgccaccacgcctggccaattttttgtatttttagtagagactgcgtttcaccatgttgggcaggctggtcttgaactcctgaccttgtgatccacctgcctcggcctctcagagagctgggattacaggtgtgagccgccgtgcccagccattgcatttttattcacatacacattgttaatgtggaacaatttaacactaatctcatcagagagcgagatgaatgtggcaattgctcattttattttgcatatattaaattgagtaggttcagctctaacataccttaagaaaaatgcatatcggtgcactgtatgtatttcaaaatgcctttcctatgattgtcatgtcctcctttaaggcttttccctcaaatttattacaaatttagtatttttagtacttgatgactctaattacatgaatgcacctggaatgacatttgtaacagaagacggtctgacttgctttcagtattcacaagttctttccagtttccaagtcttttcctagcagtaatttaggggagacagaggagtttcatgtaaagagcatgcagtttggagtcagaacctgggtatgactctgtggccttgatgaagcaagttacttaaactcttgagttttagctttctcctttacaatgcatgaatgcctatccccctacaaaacaaagattaaatgtgatgatgtatgccaaggtgctttgtatattgtaaagtgctatataattataagatgttctaaattttcaaggatctaaaccagggattggcaaacgtttttccagggagtaaatattttacgctttgcatatataatttatggaggtgttgagaggatagattagacacttgaagtactcaggatagtgcctggcatgtaggaagcacctggaaaatattcgctgtgattaccatcagtccattttaccgaggaaggagccaaggtccaggcccactgaaggacttgcataacattacaatagcagtggcagaaccagccatgcttctgcaaatcacaacctctttgagcctctgtcacctgaactgcaaaatgagtgggttagacaaaatcatctgttgggacctcctagttccacgtgctatcattctactaactggcaccctaaggttgaaagtgcttatctgctttccaatgtggcttccttacagtctggaactgacaatatgcaggagcagtaaactggcagaaaaccaggaatcagagaaagaaaatataatttaactttaaagatgtaaattatatatatagtatattatatatatttttaaagctttatatgcctcaaatatcagggaaaggagccaagtccttggtatttagtttggtgaatacttgcattgaatacatgtcaagatgtcaagtcatttttgaatgtgtctcagggatttctatgctacacattcttttaacaaatcaagtatttatgtacacatgttcagattttttgacaaaatgattaaaataatgagatggaaaatga

SEQ ID NO: 58 - DNA, 1988 bp, Homo sapiens
gattacagacatgagccacctcgcccagccttttcatggctgagtgatattccattgtgtggatggatcacactagctactctgacccatggatcccctgggcccagccaagccacagtggctgtggcgccgctgtctggccgggctgctgtttcagctgctggtggctgtgtgtttcttctcctacctgcgtgtgtcccgagacgatgccactggatcccctaggccagggcttatggcagtggaacctgtcaccggggctcccaatgggtcccgctgccaggacagcatggcgacccctgcccaccccaccctactgatcctgctgtggacgtggccttttaacacacccgtggctctgccccgctgctcagagatggtgcccggcgcggccgactgcaacatcactgccgactccagtgtgtacccacaggcagacgcggtcatcgtgcaccactgggatatcatgtacaaccccagtgccaacctcccgccccccaccaggccgcaggggcagcgctggatctggttcagcatggagtcccccagcaactgccggcacctggaagccctggacggatacttcaatctcaccatgtcctaccgcagcgactccgacatcttcacgccctacggctggctggagccgtggtccggccagcctgcccacccaccgctcaacctctcggccaagaccgagctggtggcctgggcggtgtccaactggaagccggactcggccagggtgcgctactaccagagcctgcaggctcatctcaaggtggacgtgtacggacgctcccacaagcccctgcccaaggggaccatgatggagacgctgtcccggtacaagttctatctggccttcgagaactccttgcaccccgactacatcaccgagaagctgtggaggaacgccctggaggcctgggccgtgcccgtggtgctgggccccagcagaagcaactacgagaggttcctgccacccgacgccttcatccacgtggacgacttccagagccccaaggacctggcccggtacctgcaggagctggacaaggaccacgcccgctacctgagctactttcactggcgggagacgctgcggcctcgctccttcagctgggcactggctttctgcaaggcctgctggaagctgcagcaggaatctaggtaccagacggtgcgcagcatagcggcttggttcacctgagaggccggcatggggcctgggctgccgggacctcactttcccagggcctcacctacctagggtctcactagtcgggggatttacctacctggggcctcggctgcctggggcctcggctgcctggggtctcacctgcctggggcctcacctgctggagtctttggtggccaggcatgtgacttacctgggatttcacttgccgggcttcactgccaggagcctcccctgctggggaccttgccagctggggctggggatggtgcctactggggaccttgctttctggaggctgcacctactgaggatctcggctgttggggactttacctgctgggacctgctcccagagaccttgccacactgaatgtcacctgctaggagcctcacccgctgggaggcacagggcccaagggagctggatgtgttgcccaaggtgtgcagggcaggtcagggaagggcagggtcccctaaggaggagggcgaagggtatgtgtgtgaccatcagcagtggtgtgcacatggctgggggacactcggtttgaccgccagcggatgggtgtcacaaatgcatcactatgggtgtgacctcggcgtgactctgatagtgcctgtggatgtgttgcgatgcctcaccctggagggcactgggccctgagaacgggtgcccttgaggccctgcccccgggcgatggtgcaggctggtttgcttgtggttttattgctgttgttaaccacccatgaggggtgcaaacagataatgctgttaacattttca

SEQ ID NO: 59 - DNA, 2598 bp, Homo sapiens
ccaggctccaggccctggcttagagggagcggggagtctggacttcaggctggatcccttcctcttcctggagcgggtgctggcccccaacccgcttgcgtcagggacaaaaggactccttccctttccagcctggaaagcccctctgctgcaggctggaggaagggaccctgggcccagcctatagtcagcggtgtctatgggcatggatctggacggggaaaaggacaaagcagcctccatccacagttcattccgggaccaggcccttgcaggcacgcgctgggctcctgtgggaagacactaagggccccaggacagacctcctctccgggcatctgggttcctagatggcagaggtggcagagtggggtgggatggcccaattgggagctttagcttccggcaaagagctgagcacagtacatcttcattgtgtaagattctcctgggagaccagggcccagctggtggtgagctgggggaagtgggtgatactgccgtgggaggagccacctggccctctggggaagtgcactcgctgtctgcagcgcccaggcctgggtagctgggtgggggctggggggccatctgtgctcagggtgcctgcacctgggccttctctgccctgggccaagcctgcccgagcctctctgtcctctgcctgcccagctggacatctctgggcctctctggagaccagtggggtgggctgtgggggcgtcatattgccctggcttggcatccctcttgtggctgtacccctcccagcagccccaggactagcaagtccccgagatgggggtggggacagtggttgatgccaaaggttgtgggggcaggggcggggcaggagcaggaaggtcccctgagttccctcaccttgggcagagataaaaggagcacagttccaggcggggctgagctagggcgtagctgtgatttcaggggcacctctggcggctgccgtgatttgagaatctcgggtctcttggctgactgatcctgggagactgtggatgaataatgctgggcacggccccacccggaggctgcgaggcttgggggtcctggccggggtggctctgctcgctgccctctggctcctgtggctgctggggtcagcccctcggggtaccccggcaccccagcccacgatcaccatccttgtctggcactggcccttcactgaccagcccccagagctgcccagcgacacctgcacccgctacggcatcgcccgctgccacctgagtgccaaccgaagcctgctggccagcgccgacgccgtggtcttccaccaccgcgagctgcagacccggcggtcccacctgcccctggcccagcggccgcgagggcagccctgggtgtgggcctccatggagtctcctagccacacccacggcctcagccacctccgaggcatcttcaactgggtgctgagctaccggcgcgactcggacatctttgtgccctatggccgcctggagccccactgggggccctcgccaccgctgccagccaagagcagggtggccgcctgggtggtcagcaacttccaggagcggcagctgcgtgccaggctgtaccggcagctggcgcctcatctgcgggtggatgtctttggccgtgccaatggacggccactgtgcgccagctgcctggtgcccaccgtggcccagtaccgcttctacctgtcctttgagaactctcagcaccgcgactacattacggagaaattctggcgcaacgcactggtggctggcactgtgccagtggtgctggggcccccacgggccacctatgaggccttcgtgccggctgacgccttcgtgcatgtggatgactttggctcagcccgagagctggcggctttcctcactggcatgaatgagagccgataccaacgcttctttgcctggcgtgacaggctccgcgtgcgactgttcaccgactggcgggaacgtttctgtgccatctgtgaccgctacccacacctaccccgcagccaagtctatgaggaccttgagggttggtttcaggcctgagatccgctggccgggggaggtgggtgtgggtggaagggctgggtgtcgaaatcaaaccaccaggcatccggcccttaccggcaagcagcgggctaacgggaggctgggcacagaggtcaggaagcaggggtggggggtgcaggtgggcactggagcatgcagaggaggtgagagtgggagggaggtaacgggtgcctgctgcggcagacgggaggggaaaggctgccgaggaccctccccaccctgaacaaatcttgggtgggtgaaggcctggctggaagagggtgaaaggcagggcccttggggctggggggcaccccagcctgaagtttgtgggggccaaacctgggaccccgagcttcctcggtagcagaggccctgtggtccccgagacacaggcacgggtccctgccacgtccatagttctgaggtccctgtgtgtaggctggggcggggcccaggagaccacggggagcaaaccagcttgttctgggctcagggagggagggcggtggacaataaacgtctgagcagtgaaaaaaaaaaaaaa

SEQ ID NO: 60 - DNA, 3127 bp, Homo sapiens
gtttgcatagctccctggacttctgctttgcactgccctgcaggagtgggtggggaaaggaagtggctttgaggcacacagaggggcttgttgaggccaccggaggaagcttctgccaccaatatgggacctgtgcccagcctaccagaagagagcatctgaaaacatgtatcgacatggtaacccctctgcttgaagcctcacatggctccctattgccttggtgctgaacaccctatggctgaccgtggcccagcctctgcaacagctctgcctcctctccagtggtgaagacccagcctgctgagactcctcctgcagttcctcaacatgcctgcatttctgctgccgtcagggcctttgcgaaggttgttccttgtaactggaatgcccttccatccctttttttattcaaaaggctgcaattttaattgaagaaagttcccttccaaggttcatgagttgcctgacttgcccaccggtttcctgcaagatcccttggcctggcacttagtgctcaggaaatatttggtgatgggccaactgagtgagaaggtgggatctggtgggaaggaaaggcggaaggtagaaattctgctcacttcctcattcccacctcccaaggaacccctggtgtccctgtggaacccgctttgggaaccggtggttcaggtcagccttttcactttgtactcaaagccacatcgcattgaagccacaggtggggcaaggtcatgcatgactgagtctccaaatcccttcaccctgtttggttctgcaacggggattaggggagccccacgatttgttttcaaaggatgtccgggctccaggacaggatgccctgggtcacctgatgacaggtgtggtggttggaaagggccgggtttcagctccgggtacacttcctccttccttctgctgcgtggtgtggcctcttccacgtcctcagaatccagctgttactcgtccgcggcctctcagctctagggccctctgcacactggcccccccagtgtcacgggcatccagacgggatccagtgcatcctcttttagaagaaaggcctgtctccaggtccccgagtccctctagcatctcccagaaggtgtcaagacgcagcagtgtccaggagcggcagagactctgacccatggatcccctgggcccggccaagccacagtggtcgtggcgctgctgtctgaccacgctgctgtttcagctgctgatggctgtgtgtttcttctcctatctgcgtgtgtctcaagacgatcccactgtgtaccctaatgggtcccgcttcccagacagcacagggacccccgcccactccatccccctgatcctgctgtggacgtggccttttaacaaacccatagctctgccccgctgctcagagatggtgcctggcacggctgactgcaacatcactgccgaccgcaaggtgtatccacaggcagacgcggtcatcgtgcaccaccgagaggtcatgtacaaccccagtgcccagctcccacgctccccgaggcggcaggggcagcgatggatctggttcagcatggagtccccaagccactgctggcagctgaaagccatggacggatacttcaatctcaccatgtcctaccgcagcgactccgacatcttcacgccctacggctggctggagccgtggtccggccagcctgcccacccaccgctcaacctctcggccaagaccgagctggtggcctgggcagtgtccaactgggggccaaactccgccagggtgcgctactaccagagcctgcaggcccatctcaaggtggacgtgtacggacgctcccacaagcccctgccccagggaaccatgatggagacgctgtcccggtacaagttctatctggccttcgagaactccttgcaccccgactacatcaccgagaagctgtggaggaacgccctggaggcctgggccgtgcccgtggtgctgggccccagcagaagcaactacgagaggttcctgccacccgacgccttcatccacgtggacgacttccagagccccaaggacctggcccggtacctgcaggagctggacaaggaccacgcccgctacctgagctactttcgctggcgggagacgctgcggcctcgctccttcagctgggcactcgctttctgcaaggcctgctggaaactgcaggaggaatccaggtaccagacacgcggcatagcggcttggttcacctgagaggctggtgtggggcctgggctgccaggaacctcattttcctggggcctcacctgagtgggggcctcatctacctaaggactcgtttgcctgaagcttcacctgcctgaggactcacctgcctgggacggtcacctgttgcagcttcacctgcctggggattcacctacctgggtcctcactttcctggggcctcacctgctggagtcttcggtggccaggtatgtcccttacctgggatttcacatgctggcttccaggagcgtcccctgcggaagcctggcctgctggggatgtctcctggggactttgcctactggggacctcggctgttggggactttacctgctgggacctgctcccagagaccttccacactgaatctcacctgctaggagcctcacctgctggggacctcaccctggaggcactgggccctgggaactggcacccatgggcccacccatgagtgatggttctggctgatttgtttgtgatgttgttagccgcctgtgaggggtgcagagagataatcaccgcaccgtttccagatgtaatactgcaaagaaaaccaatgatgaggccgggtgcggtggctcacacctgtaatcccagcactttgggaggccgaggcaggcggatcacaaggtcaggagatcgagaccatcctggccaatatggtgaaacccgtctctattaaaaaatacaaaaattagtggggcgtggtctcaggctcctgcagtcccagctacttgggaggctgaggcaggagaatggtgtgaacctgtgaggtggagcttgcagtgagccaagatcgcgccattgcactccaacctggacgacagagcaagactccatctcaaaaaaataaaataaaggccatatgtttaatca

SEQ ID NO: 61 - DNA, 2963 bp, Homo sapiens
ggccgacccgagcagccggttccctcctctccaggccccctccccatcccacccccgccgcctggccccagccgacccgtcccttcgtctccccgcggaatggggccggcactgctcagggtcgcgcgccctggacccagctcgctctcggtctcgcgctgtcagcgactgcccggctcgcgccgcctcgcgctctgcctcagtcagtggcgccgaaggctccgttaagcggcggcggcggttcctgtttccgtttcttcctctccgttcggtcgggagtagcatcctccactcagccacccttcccactcccccatcgtggggcagctgcggctgagggctgtggctttggcagctgcgacggggagcggcggagaccgcctctgctcccgcctggggttgctgcttttgctcagaggacatccatgaccctaatggtctttttgttcaagataaagtgattttttgcctttgttgattaactggacaaattcaggataccagaaggccctattgatcaggggccagctataggaagagtacgcgttttagaagagcagcttgttaaggccaaagaacagattgaaaattacaagaaacagaccagaaatggtctggggaaggatcatgaaatcctgaggaggaggattgaaaatggagctaaagagctctggtttttcctacagagtgaattgaagaaattaaagaacttagaaggaaatgaactccaaagacatgcagatgaatttcttttggatttaggacatcatgaaaggattctgatggcaattactgtctcattagtgaacaataaaagaaaaattgttgtattagcacaacctactactgtgaagaggaaaagaattaccccatacaagtctataatgacggatctatactacctcagtcagacagatggagcaggtgattggcgggaaaaagaggccaaagatctgacagaactggttcagcggagaataacatatcttcagaatcccaaggactgcagcaaagccaaaaagctggtgtgtaatatcaacaaaggctgtggctatggctgtcagctccatcatgtggtctactgcttcatgattgcatatggcacccagcgaacactcatcttggaatctcagaattggcgctatgctactggtggatgggagactgtatttaggcctgtaagtgagacatgcacagacagatctggcatctccactggacactggtcaggtgaagtgaaggacaaaaatgttcaagtggtcgagcttcccattgtagacagtcttcatccccgtcctccatatttacccttggctgtaccagaagacctcgcagatcgacttgtacgagtgcatggtgaccctgcagtgtggtgggtgtctcagtttgtcaaatacttgatccgcccacagccttggctagaaaaagaaatagaagaagccaccaagaagcttggcttcaaacatccagttattggagtccatgtcagacgcacagacaaagtgggaacagaagctgccttccatcccattgaagagtacatggtgcatgttgaagaacattttcagcttcttgcacgcagaatgcaagtggacaaaaaaagagtgtatttggccacagatgacccttctttattaaaggaggcaaaaacaaagtaccccaattatgaatttattagtgataactctatttcctggtcagctggactgcacaatcgatacacagaaaattcacttcgtggagtgatcctggatatacattttctctctcaggcagacttcctagtgtgtactttttcatcccaggtctgtcgagttgcttatgaaattatgcaaacactacatcctgatgcctctgcaaacttccattctttagatgacatctactattttgggggccagaatgcccacaatcaaattgccatttatgctcaccaaccccgaactgcagatgaaattcccatggaacctggagatatcattggtgtggctggaaatcattgggatggctattctaaaggtgtcaacaggaaattgggaaggacgggcctatatccctcctacaaagttcgagagaagatagaaacggtcaagtaccccacatatcctgaggctgagaaataaagctcagatggaagagataaacgaccaaactcagttcgaccaaactcagttcaaaccatttcagccaaactgtagatgaagagggctctgatctaacaaaataaggttatatgagtagatactctcagcaccaagagcagctgggaactgacataggcttcaattggtggaattcctctttaacaagggctgcaatgccctcatacccatgcacagtacaataatgtactcacatataacatgcaaacaggttgttttctactttgcccctttcagtatgtccccataagacaaacactgccatattgtgtaatttaagtgacacagacattttgtgtgagacttaaaacatggtgcctatatctgagagacctgtgtgaactattgagaagatcggaacagctccttactctgaggaagttgattcttatttgatggtggtattgtgaccactgaattcactccagtcaacagattcagaatgagaatggacgtttggtttttttttgtttttgtttttgttttttcctttataaggttgtctgtttttttttttttaaataattgcatcagttcattgacctcatcattaataagtgaagaatacatcagaaaataaaatattcactctccattagaaaattttgtaaaacaatgccatgaacaaattctttagtactcaatgtttctggacattctctttgataacaaaaaataaattttaaaaaggaattttgtaaagtttctagaattttatatcattggatgatatgttgatcagccttatgtggaagaactgtgataaaaagaggagctttttagtttttcagcttaaaaaaa

SEQ ID NO: 62 - DNA, 12815 bp, Homo sapiens
gcggcagtagctgtagcagcttcagcgaagccggagatgggcagagagcgcgcgcggcgcagcagctccagattcactgctctcccctgcagctccccgcgcccccgccgctgtcgctgcctcggtgtcccccagccccagtcgcgctcttaggacagcgccgccaccgccgcctggccctgcctgcctcctgcgccgcgcagccctcgcgagcgccccggatggcgctttacccctaggaccgatttagaatgtaataactcaaggatttgataatacagtgaagtagtataacaactgtctacgtgcttcccatgatatgttctctatattgaaaaattatgacatcaacatccaaaggaattcttcgcccatttttaattgtctgcattatcctgggctgtttcatggcatgtcttctcatttacatcaaacctaccaacagctggatcttcagtccaatggaatcagccagctctgtgctgaaaatgaaaaacttcttttccaccaaaactgattattttaatgaaactactattctggtgtgggtgtggccatttgggcagacctttgaccttacatcctgccaagcaatgttcaacatccaaggatgccatctcacaacggaccgttcactgtacaacaaatcccatgcagttctgatccatcaccgagacatcagttgggatctgacaaatttacctcagcaagctaggccacccttccagaaatggatttggatgaatttggaatcaccaactcacactccccaaaagagtggcattgagcacttgtttaacctgactctgacttaccgccgtgattcagatatccaagtgccttatggcttcttgacggtaagcacaaatcccttcgtgtttgaagtgccaagcaaagagaaattggtgtgctgggttgtgagtaactggaaccctgagcatgccagagtcaagtattacaatgagctaagcaaaagcattgaaatccatacctacgggcaagcatttggagaatatgtcaatgataaaaatttgattcctaccatatctacttgtaaattttatctttcctttgaaaattcaatccacaaggattacatcacggaaaagctatacaatgcttttctggctggctctgtacctgttgttctgggaccatctagggaaaactatgagaattatattccagcagattcattcattcatgtggaagattataactctcccagtgagctagcaaagtatctgaaggaagtcgacaaaaacaataagttataccttagttactttaactggaggaaggatttcactgtaaatcttccacgattttgggaatcacatgcatgtttggcttgcgatcatgtgaaaaggcatcaagaatataagtctgttggtaatttagagaaatggttttggaattaaaatttttcatcacttgcacacttgataaatattttgatgagatatcatccaagtattgaggataagaagagatgcaacatactacttttgtgtcacaatttatttttatcaccctctctagggtaacgtgtatattttggtggagatttttaaaagctcagcatgagcaatcattccattcggttttaaattatcctgtatatacctaattatgtgcactggagagtaatttattcttcattatcatttgtaaacattgttttttcacatttttgtagttgtccataatgtaagcttgtggtttgattattgtttccacactgatcagctgtttaatctatttgggaaatgaagatgcacatcttaaagtatgaaaaattttcactaagtattacaatgtctagttccaactttgcatactataacagaggaagaacatgttgcgattgaattctaacctctttgactccgaagatgaatgaagtgtataactgtctctatttgatctattttttttacctgtttatcacatttgtgaaggtgaaattattcatggagtgaataagaaagatatgaagcagaactgttctattcgggaagctattagacttctcatttattttcattaagctgatttgcagctacttattctcatggtcttaaattaaattattcaagtatttttaaatatccaatttgttgtgattttcagcacctgggaagtaatcccaataatactttagaaaatctaagacagttctttctgctactgatgacactcattgtcataataaaacaaataatttcctcaaataacaaagaaaaatgatacctataaatatatttataaatggtgtcatttatgaacaatgtttaattatgtatcaatttaagatttttttctgaagccctaatatttaaaatggtcttattttaccatatggatataagatttggctcataatgatgagccctatcatttgatttgagttctatcatttaagagagcctaaataaaattatcatcaaggtattaaatataagacgttaaatataataaagtggggatatatagaaaacacacagtgttagcacacagtaagatctcaatgcacatttgttggatgaataaataaatgcaattgaattcccagaaaaatgattgtttcaaggaagtgacagttctactttagaagtactaattggagatgacttttatatcccattttggtaattattcatacatagcacatatgaccatgatgttcagggctttatagaaccaaataaacctaccattacatgaaaattttgaagagtatattcctgaacttgcagctgcctatagcattctcctccataaggctagaggagagctggatataagcagagatcgtaggtgaaaaaagatgggccattaaggattcttcaaggaaaacattcctcaaaatgatctttagtgcctttattcctttcaggccaataatccacccaaaaattagaatgttctgagacatccatttgggtctatttgtgacttattcgtattacaaattgacatcagcaaaattcaaaaagaattcagtaaaaagggcatagatccagctatccagactatcttgtgagagaataagctcaccccagcaccagaaagatttgagcagaggaatattcctgtaatgaatagaggattgtttgattctcaggtatatttcttaagccaagattgaatgcagtgtcaggcactgccttaacacccacagagataagatgaacaaggtactatcactgcctaaaatgagcttacaattaagtggatagacatataaaagcttcctttcaattcagcctgagactgtttatatgcatgtgctactccgaatgacgtttgtatgggtcaatgctgatttaatggggaaaaaaagtagaaaatttccccaattgcttagctgtttgacatgtttctgagctgcaaactttgtcaactcttttgacccaacatattattctctccgtattatctcttctaaccacaatgcattaagaaataatatttttatgtggatgtcctcctcaataagtaaagatctccatccatatttaattaattggtaagacagtcaaattcatacatttacatttactttgtcaaattttttggtctataaaaagcatagagatctaaagaggatacactgctaacaagtttagaaagcacctgcttttttttattattattatttttgtgatagagtcttgctctgtcgcccaggccggagtgcagtggtgcagtctcggctcactgcaacctcggcctcccaggttcaagtgattctcctgtatcagcctcccgagtagctaggattacaggcgtgtaccactatgcctggctagtttttgtatttttagtagagatgggtttcactgtgttggccaggctggtcttgaactcctgacctcaaatgatccacttgcctcagcctcccaaagtgctgggattacaggtatgagccactgtgtctggcccacctgttttttttgaaggcagaaaaacattcaatattaaaagcattcaatattatttcaacctgccttggctctagtgaatgttcatgatttgaaagaactgaaagacctaaaggcagtgtctctattgttgactacaaatgtaggctctttgttggactatgactataatcacacactgataatatgacgcaagtagaggcagtactactaagtatctagcaggtgctttgaaaccccattactaagtcccagaagactgtttcctaaatttgaagtggaagaattaaatgactcaatggaaccctttagctgtgggtccattgatgtgtgagttttagagctggaaggaattataattttgttgtttataattgctataatatagaaattataattgcttttctttctacttatgagttaactagatccagagatatttattcaagacacacattcacacacacatacacacacacacacacacaccccacagctagtgacaatagttaagatttggatttaaggatcctatctttctttatcccactttcttttcaatcgcattcataacttattatagaattatgtctcaatttttacaaatgtgaatgtcttattggtatttttagggcctatagaatggtacacctcatgtagaagaacttcgacttttgaaggtatacaataaataaaacatcaaacttgttagcattcgttctggtttaaatattttaggagttgagttcagcagaaggaaatgggctatcactacatttaagtgaaatacaaccctcaagaaagtgtatggttcacagccactcctttaataaatcctgtgggttgcaattctttgtaagaaactcatgaaaaagatatattgattcaacaaaattggtttgctgttgattatacaaaccaataattatgcctagaattaaattgtggacacaaaaaagggaacagaccatttaaaatgttttatttcaaaatatcgaaaagctattaccttcaatactctaaatatttaaatattaattattgtagacatcagtaagaataaataaatgttaatcattatagaccttactaataagaatatatactgaattgtccacatccagagtattacaccctgaacaagaaagacatgagagcctgacagtcatatatattatgacagctgtatatctgacaatatgaagtagaaactgaaaaaaaaaatcatcttagtgggaaacaaatacatgcttaaaattgttatatttactgtaaaactcctgataatcttagattgtgcagaaatgtttcttattttgaggggcttagaaagctcagcgcatttgatgtataaagcaacagaatatttaggaattatttgcggaggctttaaattcttacctccaattggaggttaaatattaaaagaataggaaactatgcctctgatattttttttgtcagcctatttttaaactagattccatgagtcttaaggtaatatcctagaattttttttttgcgtgaattaaagttaccacaaatttcaggtccttaccttatgactgtgtttgatcatatctttgagttcccttgaactctgatctcattttgagaaacattttgagaaacttcttaacaattacaatcgagctgttaaatataacaaacatcagaatctaaaggataagcacagtgcctaatgtacaggagggtcatatcaaatacttgttgaataaatacatgaatgtgataagtggtcctgtaaaatattttttaagagtagtgacaatgtttattggtaccaattggagatgatattttatatttattttgttagtttgtcacctggatgcaaaaggaaggcattttaattcctttctatcttacaacattgtaaagcatcaaaagaagtaacatctcaagaaagattagaaaggatttggatcacgttaacattctatgcaaatattagtaacatatcaactgtttctaaaaggaaagaaaattagtatttaaggagagtataaagtgcgagcactgtgaagggcagatatctattaccaaaccacatggagagaaatatagtctctctcctaacttcattccattgtattgcaatcagtcaattaaggtgattttttttttctggatgtctcaatctagagattttgtagcattttgcaaatgggtatgcttcactactatccacagtgttctcccctttagtaattcatattgaatatatccatattcatatgcattttataaaacagttaacagaatctaaataagatatagccggctaaatctggaatgtgagtgctaccctaggttattagttcaacaaactaattttgagagagccacttaacctctctggaccttgtttgtaagctttcttctagcactattactcttatctaagatcgaaattgatatatgcatgaaattcctaatggaatttcaatgtccatctcaaagtaattttttaggatattccatacagatttccttctcatttctctgtgtagatatttaaagtatgaaattgattatttaaactaatatgtggaaagaacctaatccagagcttggaatatagaaagtgctcaattaactgacattcctcctgtatttcctccctccccttagttgtctatgacttttgaactcactgctcactgacatcttaattgcctgcagaaaaatcaatcatattttaggcattattttgaaatattttagagttttctgtactattcaaactcttattacaaaaatctaaagatatttattgatgcaaaaaatttagggagtcattggaaatacctgaggcaatcccaggctaacaataaaatagcataattttaagtaagctagattgagttcatttgaacatttagttattttttagctcatagttaacatatgtccatgcatttgatttactttaaaaatattttatttaaaaataacctctcaaacaccagttgctttctgtcagttttactcaaagcatgcttcctaggtcacctgacctagaatcaccagaagtgttaacaataccgatttctgggctttgagccatgaaattagaatttcttcaaataatccatgcccccccgtcacccaaaaaaagagcatgcttttaatacatttccaaaattatcctgtttctgctataactggtgaaccatcctgtcctaaactagcagttctcaaacatgcatatgcctttgaaacttcctagatcatctacataaaaatcatttgaaatattgttaataatacacagcttctgaatctctgggtgtgagatgggaccaggaatcttattttaaaaatctccccagatggttctggtgtcctgctagttttgaggttttcatcccacctgtttagatgggtagtattctattaaatatgaggtattacctttctttagttcacctggaatcttcttaaatatatcggtaaagtattctacttcaaaatccaagacattttgtatacctaattatttcacacaagagcgtggaactcaccagtcttgtgacttggggcaggttatttatagtctccagacactttttccagttgcgagttgcttatagtagttcgcgaacctgaatgcacattagaaccatctggagaggctttaaaattgcagatgtccaaaccccacctccagagagctgatctatttagtttgaggaagagcccagaagtctaacaggtgtaaatgttccacaggtaatactaatgcaggcatacctcaggaaatcaccagttctcgtcttggaggaactattaggaaaataaaagattatatatcttgaaaaaaatctctaatttgctttctaggttctaactgcatgtttatattttgcaacaggaaagactggtctagacaattactaggatatatgcttctgtgatctgcttttctattgtatgtgtttaagagaccacattcttgggttccaaagtctccttgtctgataggtaatttgcaattgagatatggcaaagaattgtagcatccaaatttttgacaactacagatttagaattgaatccaaggtctgccattcactagctatgtgcaagttactcaacttctcttatcctcagattttgcagctgtaaagcagaggtagcatatttctgagaaattatattcaggtgactagatatgtgttcaagtgttatcttttattcttataaaagataattgtgaggaatccagtgctattttcacaattttaattctaaaactctgaagacattaaacaggcagtttgtaggaatcattgaaattttatacaagccgaaggaacaacattcagcaaaacggaaacaaataaatacagcatggaagcatatattcatgtttcccataattactaagttacggaaggggtgtgaggagctggcagtggtggtgaataggcattgtttgcattactaaatatatataccatttcttaagataattggaactcaagcagtcctaattttctctccctgttatgagcaatcagtaaatttgtagtcaatttaacttattatcagttggtatagcgcatgtcacagaataggatagcaagaagattctcagagatcattttctggtaaagaaaaaggcctagcaatatttaacagtttgacttaatccatcacttcagctggtccactagttttgacacaggactagttaatgatttgttaggaagtctccatctactcttaaactaatttaaaaaaaagctaaaagttgcttttaatatgttagggtataacttcaataaacaggagtatttatctagtggttcagaaataaaataattgttagccagcctgtgattaaggctaccataattgcataataaatagctttgacgtgaataatctcagttgttcaagtgtacaaatttaaagctgtactatgttagaataaaaaagtaggctcaaggaaaatttctatttttctatatgaaaaagagaatgatattcaaaatagtatttttaagtagtttctaattgtgttcctttaaagagtattagaaatgtctgttatgtcagtaacattagaaaacttcaaaaactgatttatttttctgagttctctggaaaccaaacaattttgaattagttgtgtaagtaaagtaagttaagttatagcttgctggaattttattgtggaaaacaaatatagattttatctgaaaaattttaagggccaattctacagaaagttatgctaacatgctaactttccacacatggctgcattccattttgattaatgagggttcaggaaatagaaaggcagtctctgcagaagcagtatccaaaggctaaattaacaacccaggactaccactcattatgtgagaaatatgggccagagttacaatatcacatctccagtctcagattggcctcattagccaccttcagttccttaaatgagataatcctgaagatgccatccttgtccaaggtgagattgccagaggatatgagctcatctaggatggaatacatgtctccagggactgtaatgagatcaggcttttcatttactggttttctgcctcaagagtccttaagcaaatgaagattatctgattgtctatgtaaacctggaagtagtctactttttagataaaagataatctatcttgaatatttcatatgtgattttaaaataattaatcaaaaaacaaagactatcatatttgagaacaagattttacttagaagggaaaaaaaagaactttcagcttaatcggggttaagggagtaattgtgacaatataaaatggcattgttatagaatccctaaaaggtaaataatgtatgagatgaaggtaggaagtaatgtgtgcttgcagaaatgcaactggtcaaaattacttgaatgaaattgttgaggttaaacatcttcattataataatatgtcttattctgattccaagacaatacgaatgtagagaagagatttttaaatggaaaaagtaaggagctaacaagtctgtacctagattcaagttcacaaagcggcaaaaaggagaaaagtgtcaacaagaaacaagaagaggagtagtaaactaaggatcaaagcccaagttccagttttcacaatctgctgtataattcactaacatttctgagccatagatttttaatctgtaaaaggagtgtgatggactgtacattagaagtacctgagaagctcttaataaatcttgatgaattggttagaaattctaatttaattagcctggcacagtgcacaaactgccatatattcgtgcagatgttttcttcttttcttactgcgcatttccatgtggccatgtcactacaaggggtggggaagaagttaatgtgtaattgcttcaggagctctgaataaaaggttgctgaagcaaaatactgcaatgaagttctgaaaatgaagagttaggactttacatgatttctcttgcctcattccctcaagaatgcacatatagacacacatatgccaatatcttttttatgtagttcaagtataactttgaataaaatgacttacattcaaggaaggtcaaaactattattctgaaacaaaatgtgacaattctagccattatgtgaattgtaagggtcagtaatccataaattatttggatggtaattgtatgttttattaatgtgatgtaattttgcactattgtattgtcatatttaatcaaactcttaaaaataccctgaaacataatgccaaatgtacagtttataggttcgtgttatttctgataagaatttaattgcattgtgctaatagttgtttattgctattaactttctgtgtatgtattattgcgatgcagacccaatagggttattttaagcacactaattagtcatctggatttttatagataaaatcacatgttgatcagaaatcatttttctacttatttttttgtagagtatttttccacacttgaaaaaaacatgattattttatatcaaacatcaacttttctttaaatcttattttagtagctaatgcatgtttgaaataagatgtgttagaaattatatgactatattaaggttgtgtttatattaggtgaaaaattgcatgcaattggtgaatcatgcagctttggggacatttacactgccactcacacacaggctctgtctcaatccgtatgcatgattcacgtcctttcaaaagtcccttttcaacatttggtaaagtgaaaatgttattcatagtgctaatgagccaataaacaatgctgcgtttcttttttctaactgcagcatattgtggtaaattttctcccaaaactttatttttggagttattgttggcaataaatacaacaaattatttgttggcaagtgatacaatttactgtataacaacttaatagtacaaagcatgaagatgtgaaaatatcatcttaaccagtttcattctatgaacataatattctggcagctttttctataactgagaatggtatatctttttatacactgcctaaatcagtactactgccagtcacctgaggtcaggtctgcacaacactaaattgggcaataacatagaacatctaggcagtcttgacagtcaaccagtgtaatcactaggggaagaaaaagtaggcctacccttttacttattaacttaagtaataaaaattgtataaaaatatgaatgttggctgcagaggagcctttacatgcagataatttgaagcagtctttgaaaataacaaaaattattccatttaatgaagggtttgttttgtttagcttttctcttttattcagaaaacatacctgtgcttttgaaagggcttaatcccaaacaggtaatatgtgtggatcaatcatctctcctcccatgaaattaatcattcatggtaatatattaaggctggaacgtagctcttagtgacttaaaacatgacagtaagcatttacactgttggaaggtaatttcattgctatgttattaaaatgatgggaatcctatttatacatttatttatttatttatttacagaagattggttccttccagttcaatttaacagcttcagtgaagttagtataatgataagaaaaattgactgtagctattattccaagtgaaaatcatgcagctgagtcctgctgcatcctgggagcaaagcattaattcaaatgaggagtagtcagtcctagcactgtagacgccgactttaccaaccaagatagtgtatgtgtgtgacattcagctaacattgatctaggcacttagtttgctaccacattgttcccttcattgattgaaactgtaaataacataacactttaaggcagctaagcaaatattttaataagccatgaaaggcaagatgccagagaaaatctgtatattcagctatttggagaactcgtgttttccacaaattaaactggagatgtcatttgaaattttcttcccttaaacatgctgtcacaacatggattccttctcatggatgtctttctaggcttataaatatatggtgtgattgctataattttgtgaaattttattcagcaattaatagtgatttcagcaatatgtactaagattccaaggcagaaataaatgtataaaggatttgagcctgtatgtgtaagaagaaactctctcttcagtcatatttcctaaattcagtgtaagtacctcgctgatttagcactggagttattccttgaatgtgtaaataatgatgttctattctgacctaatgaattcctgtaatgtgaatatttaaaataaaagaattcaatttaaatgtaaaaaaaaaaaaaaaaaa

SEQ ID NO: 63 - DNA, 4331 bp, Homo sapiens
atgtcgctgctgcagtctgcgctcgacttcttggcgggtccaggctccctgggcggtgcttccggccgcgaccagagtgacttcgtggggcagacggtggaactgggcgagctgcggctgcgggtgcggcgggtcctggccgaaggagggtttgcatttgtgtatgaagctcaagatgtggggagtggcagagagtatgcattaaagaggctattatccaatgaagaggaaaagaacagagccatcattcaagaagtttgcttcatgaaaaagctttccggccacccgaacattgtccagttttgttctgcagcgtctataggaaaagaggagtcagacacggggcaggctgagttcctcttgctcacagagctctgtaaagggcagctggtggaatttttgaagaaaatggaatctcgaggccccctttcgtgcgacacggttctgaagatcttctaccagacgtgccgcgccgtgcagcacatgcaccggcagaagccgcccatcatccacagggacctcaaggttgagaacttgttgcttagtaaccaagggaccattaagctgtgtgactttggcagtgccacgaccatctcgcactaccctgactacagctggagcgcccagaggcgagccctggtggaggaagagatcacgaggaatacaacaccaatgtatagaacaccagaaatcatagacttgtattccaacttcccgatcggcgagaagcaggatatctgggccctgggctgcatcttgtacctgctgtgcttccggcagcacccttttgaggatggagcgaaacttcgaatagtcaatgggaagtactcgatccccccgcacgacacgcagtacacggtcttccacagcctcatccgcgccatgctgcaggtgaacccggaggagcggctgtccatcgccgaggtggtgcaccagctgcaggagatcgcggccgcccgcaacgtgaaccccaagtctcccatcacagagctcctggagcagaatggaggctacgggagcgccacactgtcccgagggccaccccctcccgtgggccccgctggcagtggctacagtggaggcctggcgctggcggagtacgaccagccgtatggcggcttcctggacattctgcggggtgggacagagcggctcttcaccaacctcaaggacacctcctccaaggtcatccagtccgtcgctaattatgcaaagggtgacctggacatatcttacatcacatccagaattgcagtgatgtcattcccagcagaaggtgtggagtcagcgctcaaaaacaacatcgaagatgtgcggttgttcctggactccaagcacccagggcactatgccgtctacaacctgtccccgaggacctaccggccctccaggttccacaaccgggtctccgagtgtggctgggcagcacggcgggccccacacctgcacaccctgtacaacatctgcaggaacatgcacgcctggctgcggcaggaccacaagaacgtctgcgtcgtgcactgcatggacgggagagccgcgtctgctgtggccgtctgctccttcctgtgcttctgccgtctcttcagcaccgcggaggccgccgtgtacatgttcagcatgaagcgctgcccaccaggcatctggccatcccacaaaaggtacatcgagtacatgtgtgacatggtggcggaggagcccatcacaccccacagcaagcccatcctggtgagggccgtggtcatgacacccgtgccgctgttcagcaagcagaggagcggctgcaggcccttctgcgaggtctacgtgggggacgagcgtgtggccagcacctcccaggagtacgacaagatgcgggactttaagattgaagatggcaaagcggtgattcccctgggcgtcacggtgcaaggagacgtgctcatcgtcatctatcacgcccggtccactctgggcggccggctgcaggccaagatggcatccatgaagatgttccagattcagttccacacggggtttgtgcctcggaacgccaccactgtgaaatttgccaagtatgacctggacgcgtgtgacattcaagaaaaatacccggatttatttcaagtgaacctggaagtggaggtggagcccagggacaggccgagccgggaagccccaccatgggagaactcgagcatgagggggctgaaccccaaaatcctgttttccagccgggaggagcagcaagacattctgtctaagtttgggaagccggagcttccccggcagcctggctccacggctcagtatgatgctggggcagggtccccggaagccgaacccacagactctgactcaccgccaagcagcagcgcggacgccagtcgcttcctgcacacgctggactggcaggaagagaaggaggcagagactggtgcagaaaatgcctcttccaaggagagcgagtctgccctgatggaggacagagacgagagtgaggtgtcagatgaagggggatccccgatctccagcgagggccaggaacccagggccgacccagagccccccggcctggcagcagggctggtgcagcaggacttggtttttgaggtggagacaccggctgtgctgccagagcctgtgccacaggaagacggggtcgacctcctgggcctgcactccgaggtgggcgcagggccagctgtacccccgcaggcctgcaaggccccctccagcaacaccgacctgctcagctgcctccttgggccccctgaggccgcctcccaggggcccccggaggatctgctcagcgaggacccgctgctcctggcaagcccggcccctcccctgagcgtgcagagcaccccaagaggagggccccctgccgctgctgacccctttggcccgcttctgccgtcttcaggcaacaactcccagccctgctccaatcctgatctcttcggcgaatttctcaattcggactctgtgaccgtcccaccatccttcccgtctgcccacagcgctccgcccccatcctgcagcgccgacttcctgcacctgggggatctgccaggagagcccagcaagatgacagcctcgtccagcaacccagacctgctgggaggatgggctgcctggaccgagactgcagcgtcggcagtggcccccacgccagccacagaaggccccctcttctctcctggaggtcagccggccccttgtggctctcaggccagctggaccaagtctcagaacccggacccatttgctgaccttggcgacctcagctccggcctccaaggctcaccagctggatttcctcctgggggcttcattcccaaaacggccaccacggccaaaggcagcagctcctggcagacaagtcggccgccagcccagggcgcctcatggccccctcaggccaagccgccccccaaagcctgcacacagccaaggcctaactatgcctcgaacttcagtgtgatcggggcgcgggaggagcggggggtccgcgcacccagctttgctcaaaagccaaaagtctctgagaacgactttgaagatctgttgtccaatcaaggcttctcctccaggtctgacaagaaagggccaaagaccattgcagagatgaggaagcaggacctggctaaagacacggacccactcaagctgaagctcctggactggattgagggcaaggagcggaacatccgggccctgctgtccacgctgcacacagtgctgtgggacggggagagccgctggacgcccgtgggcatggccgacctggtggctccggagcaagtgaagaagcactatcgccgcgcggtgctggccgtgcaccccgacaaggctgcggggcagccgtacgagcagcacgccaagatgatcttcatggagctgaatgacgcctggtcggagtttgagaaccagggctcccggcccctcttctgaggccgcagtggtggtggctgcgcacacagctccacaggttgggagccgtcgtgggacctgggtccccaccgtgaggaccccgtgggcgacagcaggtgtggccagggtggggctccgagccccgggtcaccgcccgcccagcgttccaggcacatgaagagaaagcattccaaagcctctgattgttgtttcctttttctcctcccgaaggaacagctgattcatgctcctcccgcaattgtcacgtctgtgatttatttggtgtttcgggcgtggcctctggagccccggcacgtggtgggccacgctgctggcgctcatgggccctggtgtttgcaccgcactttgtaatcagtcccgtggttgtctgtacagaattaaactattttccgatg

SEQ ID NO: 64 - DNA, 1449 bp, Homo sapiens
tcacctgccccacagccgcaccctgcctgtgcctgcaccctggggagcccagagccggcaggggccgaggcggtgggacctcgggggagctcaagcctcgactgtcccctcgctggaggccagaggccaagatgatgtccatgctgggcggcttgcagagatacttccgggtcatcctcctcctcctcctggccctgactctgctcctgctggccggattcctgcactcggacttagagctggacacacccctgtttgggggccaggctgaggggccgccggtcaccaacatcatgttcctgaagacgcacaagacggccagcagcacggtgctcaacatcctctaccgcttcgccgagacccacaacctgtccgtggcgctgcccgccggctcacgcgtccacctgggctacccctggctcttcctggcgcgctacgtggaaggcgtggggtcgcagcagcgcttcaacatcatgtgcaaccacctgaggttcaacctgcctcaggtgcagaaagtcatgcccaacgacaccttctacttctccatcctgaggaaccccgtgttccagctggagtcctccttcatctactacaaaacctacgcccccgccttccggggcgccccgagcctggacgcgttcctggcctcgccgcggacgttctacaacgacagccgccacctcaggaacgtctacgccaagaacaacatgtggttcgacttcggcttcgaccccaacgcgcagtgcgaggagggctacgtgcgcgcgcgcatcgccgaggtggagcggcgcttccggctggtgctcatcgccgagcacctggacgagtccctggtgctgctgcggcgccggctgcgctgggcgctggacgacgtggtggccttcaggctcaactcccgcagcgcgcgctccgtggcccgcctgtcgcccgagacccgggagcgcgcgcggagctggtgcgcgctggactggcgcctgtacgagcatttcaaccgcaccctctgggcgcagctgcgcgccgagctggggccgcggcggctgcgcggggaggtggagcggctgcgcgcccggaggcgcgaactcgcgagcctgtgcctgcaggacggcggcgcgctcaagaaccacacgcagatcagagacccgcgcctgcgcccctaccagtccggcaaggccgacatcctgggttacaacctccggccgggcctggacaaccagacgctgggcgtgtgccagaggcttgtgatgcctgagctccagtacatggcccgcctgtacgccctgcagttcccggagaagcccctcaagaacatcccgttcctgggggcgtagaggggccgggccggggacgaggcctcctgcggacaccagctcctctctccgccgtcaccggggaggccggggatccttgcagggcttctggggcgttgggaaacccaggcccgccggccac

SEQ ID NO: 65 - DNA, 1585 bp, Homo sapiens
gccggagtgggccgtcagcacttaaagggcccgcggctcgggcgtaggaggcggtgcctctgcagcaagcgtggggcgcgggaacccgagcaggactctccagtcctcagtcaccttggacaaagaagtgtggatcctcagattccatcttttccaactccaaggtgccatggcagagaaggtgctggtaacaggtggggctggctacattggcagccacacggtgctggagctgctggaggctggctacttgcctgtggtcatcgataacttccataatgccttccgtggagggggctccctgcctgagagcctgcggcgggtccaggagctgacaggccgctctgtggagtttgaggagatggacattttggaccagggagccctacagcgtctcttcaaaaagtacagctttatggcggtcatccactttgcggggctcaaggccgtgggcgagtcggtgcagaagcctctggattattacagagttaacctgaccgggaccatccagcttctggagatcatgaaggcccacggggtgaagaacctggtgttcagcagctcagccactgtgtacgggaacccccagtacctgccccttgatgaggcccaccccacgggtggttgtaccaacccttacggcaagtccaagttcttcatcgaggaaatgatccgggacctgtgccaggcagacaagacttggaacgcagtgctgctgcgctatttcaaccccacaggtgcccatgcctctggctgcattggtgaggatccccagggcatacccaacaacctcatgccttatgtctcccaggtggcgatcgggcgacgggaggccctgaatgtctttggcaatgactatgacacagaggatggcacaggtgtccgggattacatccatgtcgtggatctggccaagggccacattgcagccttaaggaagctgaaagaacagtgtggctgccggatctacaacctgggcacgggcacaggctattcagtgctgcagatggtccaggctatggagaaggcctctgggaagaagatcccgtacaaggtggtggcacggcgggaaggtgatgtggcagcctgttacgccaaccccagcctggcccaagaggagctggggtggacagcagccttagggctggacaggatgtgtgaggatctctggcgctggcagaagcagaatccttcaggctttggcacgcaagcctgaggaccctcccctaccaaggaccaggaaaagcagcagctgcctgctctccagcctctggcaggaactcagggccctggagctgctggggccaagccaaggcctcccctacctcaaaccccagctgggcccgcttagcccaccaggcatgaggccaagggctccactgaccaggaggccgaggtctctaactcttatcttccacagggtccaagagttcatcaggacccccaagagtgagtgagggggcaaggctctggcacaaaacctcctcctcccaggcactcatttatattgctctgaaagagctttccaaagtatttaaaaataaaaacaagttttcttacactgggaaaaaaaaaaaaaaaaaaa

SEQ ID NO: 66 - DNA, 3778 bp, Homo sapiens
tttttaaattttgcatttgacttaaagtgccatgagaaaatttgcatactgcaaggtggtcctagccacctccttgatttgggtactcttggatatgttcctgctgctttacttcagtgaatgcaacaaatgtgatgaaaaaaaggagagaggacttcctgctggagatgttctagagccagtacaaaagcctcatgaaggtcctggagaaatggggaaaccagtcgtcattcctaaagaggatcaagaaaagatgaaagagatgtttaaaatcaatcagttcaatttaatggcaagtgagatgattgcactcaacagatctttaccagatgttaggttagaagggtgtaaaacaaaggtgtatccagataatcttcctacaacaagtgtggtgattgttttccacaatgaggcttggagcacacttctgcgaactgtccatagtgtcattaatcgctcaccaagacacatgatagaagaaattgttctagtagatgatgccagtgaaagagactttttgaaaaggcctttagagagttatgtgaaaaaactaaaagtaccagttcatgtaattcgaatggaacaacgttctggattgatcagagctagattaaaaggagctgctgtgtctaaaggccaagtgatcaccttcctggatgcccattgtgagtgtacagtgggatggctggagcctctcttggccaggatcaaacatgacaggagaacagtggtgtgtcccatcatcgatgtgatcagtgatgatacttttgagtacatggcaggctctgatatgacctatggtgggttcaactggaagctcaattttcgctggtatcctgttccccaaagagaaatggacagaaggaaaggtgatcggactcttcctgtcaggacacctaccatggcaggaggccttttttcaatagacagagattactttcaggaaattggaacatatgatgctggaatggatatttggggaggagaaaacctagaaatttcctttaggatttggcagtgtggaggaactttggaaattgttacatgctcacatgttggacatgtgtttcggaaagctacaccttacacgtttccaggaggcacagggcagattatcaataaaaataacagacgacttgcagaagtgtggatggatgaattcaagaatttcttctatataatttctccaggtgttacaaaggtagattatggagatatatcgtcaagagttggtctaagacacaaactacaatgcaaacctttttcctggtacctagagaatatatatcctgattctcaaattccacgtcactatttctcattgggagagatacgaaatgtggaaacgaatcagtgtctagataacatggctagaaaagagaatgaaaaagttggaatttttaattgccatggtatggggggtaatcaggttttctcttatactgccaacaaagaaattagaacagatgacctttgcttggatgtttccaaacttaatggcccagttacaatgctcaaatgccaccacctaaaaggcaaccaactctgggagtatgacccagtgaaattaaccctgcagcatgtgaacagtaatcagtgcctggataaagccacagaagaggatagccaggtgcccagcattagagactgcaatggaagtcggtcccagcagtggcttcttcgaaacgtcaccctgccagaaatattctgagaccaaatttacaaaaaaacgaaaaaaataaggattgactgggctacctcagcatacatttctgccacattcttaagtagcaaaaaaggaaaagtgctttcctcctctgcaggatgtaaggtttatcagccattaaaacttagacttctctagcttttcactagctgtgaaccagccttcctgtccatggacgtgaaactgcatagtaatgagactgtgcacactgatgtttacaagattgaaagagtctttctccgaaaatcatggtaaagaatactgagacaatgaaaaaaaatcaacaaaatatgctttctggagaactgtaccttctatggtttgcttgcacatcagtagtttctgctgaacgtgctgtcataatgaagagatttccaagattttttttcctgattagaacgggtagccagtatattaaatattgatagaaaaataaaagaactggaaccagattcagaatcttgaaaacaacattttttacaacaaacaaaaaaactatattaaacagggtttaaaggaaaattaaaacagaactatgaagaagtacaatttgttatagtatagtatcaaatttctatatagattttatacctcagtggggaaaaataactgattccaatgacattcattttgttttcatctgtgatagtcatggatgcttttattttccttggggtgctgaaattgagctgaaaaaaaaaggctctttgaatatagttttaatttctctctacagttttttttgtttggtttgtgggctgttggaattgtaatttttaattgccttctaaaaaatggaaatttaacaatgtctgatctcagctgaacaaattagatgtttcagttgctcttgggtcaactggcttacagatttacatgtgcacacacacacaaatttcttatcacattttcgacttcttcacttgacctaactgattatgcgaaatacccaagattcatgctactgttccacatttgttttcacagcaataaatcttcagttctgttgtttatgattccacttaacaaggggcctgcaaatgtgatttattatttgggtatttggagataatacatttgagggttttttggaaaacctttttcactccatactcaaatatgcttcattgtcaaatgcatatttaaattaaattattgaattgtaatgtttatctgctgctttttttaaataaaatttgactgaaaatgtttaattggcattttttaatgacttacccaagaaaagtgcagctattattccatattaataggcttgcatttcttttcctaaatcttatttaggctaaatcagttttattgtcctctgattttttttaataccacagaaatcacctgagtgtcaattgaaaagttgtcaattaaaaggtaaccttttaactctcgtaggaggaatctcattaagacatttttcctgatatgtagagcagtctgttggcaaaaatgcatatattttctttcatatttgtaaaattatatttaatggaattcttttctttgattatcaaggactttcactgcaggcagtgctatttcttgtgcctaagaatgtttccaaaagtcgcatcgctaatgatatttgccaagttgagtgtacacaaagtttctcatatcctgttcaagttaatcaacatcaaacacatggggatgctttagggtgagtctataatacaaaatgcataaaccatgtccccaggaaatttgaaaggaagcaagtgctgaatggaatttttttccttttccatgagctgtgttaattctatctccagtaggcctaatgcttgaaataagcaagatgtctaatcaataaattattttcatgctcagaatttcaggtttttgtactccagcatagcttggtcttatttcttactgtatgaaagcttaacagcaatgtgatttaaggttttgttttaaatgggagatgtaagtgatttaattcatgggtacttttagaacctgatagataatcccattgcctttatttttctaattaaagaatcctaaatactttgaaaatacaaaatattcctg

SEQ ID NO: 67 - DNA, 4361 bp, Homo sapiens
cacatttcttagcttctctgagcctccatttcagcatctgtaaaatgttactacctactttataggttttctgatgaggcttaagtgtggttgtgcatgtgaccatcttagcatagtgtgtggcaatggtaagcactcagtgctgtcagctgtttttaccgctgttattatattactgtgttttcccatgtcattaggtctgtgatccaggcttcagcagacaatccaggctgatgcttttgctgagtgcactaagggatgctggcctggcgggatggtgaactggaagcagaaacgtcatcctctctcttccttcttgccatgcaggtgtggatgtgtgggggccgcatggaggacatcccctgctccagggtgggccatatctacaggaagtatgtgccctacaaggtcccggccggagtcagcctggcccggaaccttaagcgggtggccgaagtgtggatggatgagtacgcagagtacatttaccagcgccggcctgaataccgccacctctccgctggggatgtcgcagtccagaaaaagctccgcagctcccttaactgcaagagtttcaagtggtttatgacgaagatagcctgggacctgcccaaattctacccacccgtggagcccccggctgcagcttggggggagatccgaaatgtgggcacagggctgtgtgcagacacaaagcacggggccttgggctccccactaaggctagagggctgcgtccgaggccgtggggaggctgcctggaacaacatgcaggtattcaccttcacctggagagaggacatccggcctggagacccccagcacaccaagaagttctgctttgatgccatttcccacaccagccctgtcacgctgtacgactgccacagcatgaagggcaaccagctgtggaaataccgcaaagacaagaccctgtaccaccctgtcagtggcagctgcatggactgcagtgaaagtgaccataggatcttcatgaacacctgcaacccatcctctctcacccagcagtggctgtttgaacacaccaactcaacagtcttggaaaaattcaataggaactgagccctcatgtccccttggcaggccccccagggtctggcactcactgcagacttcctctttcaagggaggcagggcccctgtgggcactaggtgtaaaaggtgctggccaaatggttcagggtgaagagggctcttgattcaggggctggggtctgcctggtccttgagcccctgagttgtgggggtagggtgaagagcatatcccacaagaggccccacagggagcagagactgctttaatccctgctgacatcacggaaaagcaacagagccttttcaactttgtcactatgtccccttgaacattatgtgggagaacaccaaggtagcctaggccacccaaaagtgagtcctgcgaggttgcccagccctcagatggctctcctacatgatggtgctttagaaacaaaggtaaaatttgcctgtttggggcagcttttagtatcgatgccactcatctgcagcagaagagaaagaagtcctcttggggctttttagtttctgccgtcctggggggaacattgcagttactgcacagcttctgttctctgtcacaaccccaggtgatttggtccggtcaaaggccatacttggggccctaagagtgttcagtattgaatgctgatcagctgccaggtgaggagtcagaagagggagcccccctagacatttctttgcagctatggacatgcgggatatctccccctgctctctgggtatttgaaatgtcaattttagcactctccaggcacaaggacagcccagcaccagctttacagggcagtgtttcagatggccctgagcccacggaaaaggccaggtagacctccaaactagaaatgctggctgatttgccctgatccatgcttccatttccctgtctctcttccccaggcaattactggcctcaaaagaggaacagaggtgctgcgaggtgctcacctcacagagtctggaggcctccaggatcaactgtgggcaaagtgcctgcctctgacctcatcatggttctagttctcatacagaactccagaatttttaaagaactctataattggattgcaaactaggatgctacataggattctggtattccacatccaatatggatttctagaatgctgtgattaaaggagccagccaggtgtaatacagtcaaggcagcccccagcctagagacaatctgtgaaatccaaagttggtggtgttgggaaagcagggggacatgtgtccctcagctcagcagaggctgtggtacaacatggtccttggtgaagacctgcacccctggaacctcccaccatcatcacaactgtagtctcatttgcagtggagaaaagaacccgacgtcccacagccagatatacacccagctccatgccagcccttcatgtttaccttttgctttgttaattacatgtcagactcctagagggcctccagactaataggaagcatttctgtaaccaacctgccacccactgattcagaaatggaaatcacattccacaatctatggcttccaccagctagcccaggaaatacttgaaatcagcattccaattagtgttgagtctcttgattgtgtcatttaccaattaaataactgagacctaagtctgggaacagagccacgaatctgcctttgagatgctggcagatctcaaggccatcaattattgggggagggagggacaaacactcccaatcatccaccagtcagactgaatgtgtagctggcgaggaattacttccacttctggcccagcacaagccctgctttggccacctgtctgcaagagaggcggcccctgtgcttgcaacgcttacgtgttgatcccagtgtccttttccaaatgagtgctgtagctttagaagtggccctctatagaaagaagtcaaaagatgaggccccttctagaatctaggataacaagagtgttgacagtttgaggagtcgaattgagattcatcatcaaagagcaatgcagcgtcgttaaaataaaaactgtgccttttaaaaagaaaaatgcaaatatagagcaaatccctaaacttgaaccatttcctagtgccttgctagacaaacataaaggggcagggttgtggggaggggaacgtttttggtggtgtgtgcagttcctactggatgagtgtgtgtttcttaatgtctcatttcaagcaggagatgttgggtctggagcaagatctgagactgagatgtcccccaagggtgacaggtcagatttatttcagtcagtgcaagtcacactccaaactaaaggctgggcagtgcgtttagtctgtggcctagaagacctcatcagcccccgagaggaggccttgcattacctcactgggacctgtttgggggccatccctgcggtccaccctctgaacccccagcatgtttgtcctgtttctcaccattgggttaaggggtgccgagcactagctagacttccacatagtcccaccccaagtgggcggcagtgttcctggcatgaccaggattcctgtgaaagcaggagcagcagcaagccgtcccgggcctgcctttcccatcctttggttctcctttccagtctgggttcacaccctgaaaagggatgggtgtgtcctctgagcactctggcatttgtcattgctgagcccatatcagtaggtcctgggacttgacaaagtatgtgggaggggaaggaaggacagaacttgactggctccatttcatggaccaactgatcaattgccagtactaagccactcattgttatggcttcctttttgaaaaccacctgtctcaaggattcaggtttctgctcacatccccagctgatgctcaataaaactcagccaggagcatatggagatgctgacagccaggtaatgggtgagactgtggggtcccttttcctctaaagcctttactctgaggataaggtcacaaagtagggtgtgacttgaaagtatcgtgaccatgtggcccaccagcagcctttccaaaggggaactccagagacatttcataatgcaaacagcactgttgctttaagaacaaggcctttggaggtggctaaacttgcacgcacgtgtgtgaaaagccatcccatcttctgcctccagttggagctttcagctgttaaaacagtcagaaactattgattcttccctttaggaaaaaatgctcaggcagaacggggtacatccacaggaggaatcggacgagaggatgtgacattcggtccaggagagaaagagcagtttctgttaaagatgta

SEQ ID NO: 68 - DNA, 2591 bp, Homo sapiens
agttcagcccgcgccgctcctgcgggtcggactggggctgtggcggaaattgacaatggcccttcagctatgctaggtctataatgggaagtgtcacagttcggtatttctgttatgggtgcctttttacatctgcgacctggacagttttgctttttgtttatttcaacttcagtgaagtgactcagccacttaagaatgtgcccgtcaaggggtctgggccccacggaccatctccaaaaaaattctatccccgtttcactcgaggcccaagtcgagtgctcgagccacagttcaaagcaaacaaaattgacgatgtgatagacagtcgtgttgaagatccagaagaaggccacttgaaattctcttctgaattaggtatgatttttaatgaacgcgatcaagagttgagagacttgggctatcagaaacatgcttttaatatgcttatcagtgaccgcttgggctaccacagagatgtgccagacacaaggaatgcagcatgtaaagaaaagttctacccacctgacctgccagctgctagtgttgttatctgtttctataatgaagcgttttctgccttgcttcggacagtgcacagtgtcatagaccgcacgccagcacacctgcttcatgagatcatccttgtggatgatgatagtgactttgatgatttgaaaggagaactagatgaatatgtccaaaaatacctccctggaaaaattaaagtcataagaaatacaaagcgtgaggggttgattcgagggagaatgattggcgcggcccacgcgacaggagaagtccttgtgttcctggacagccactgtgaagtgaatgtgatgtggctgcagcccttgctggccgccatccgtgaggaccggcacaccgtggtgtgcccagtgattgacatcatcagcgccgacacgctggcctacagctcgtcccctgtcgtccgcggagggttcaactggggactgcacttcaaatgggatcttgtccccctttctgagctaggacgagcggagggagccactgcaccaataaagtcaccaacaatggctggaggtttgtttgccatgaacagacagtatttccatgaacttggacagtatgatagtggcatggatatctggggaggagaaaatttggaaatatcatttcggatctggatgtgtggcggtaagctcttcatcatcccttgctctagagtaggacacattttccgaaaaaggcgaccatatggatctcccgaaggccaggacaccatgacacacaactctttgcggctggcacatgtctggttggatgaatacaaggagcagtatttttccttaagacctgacctgaagacgaaaagctatggcaatatcagtgagcgtgtggaactgagaaagaagttgggctgtaaatcatttaaatggtatttggataatgtatacccagagatgcagatatctgggtcccacgccaaaccccaacaacccatttttgtcaatagagggccaaaacgacccaaagtccttcaacgtggaaggctctatcacctccagaccaacaaatgcctggtggcccagggccgcccaagtcagaagggaggtctcgtggtgcttaaggcctgtgactacagtgacccaaatcagatctggatctataatgaagagcatgaattggttttaaatagtctcctttgtctagatatgtcagagactcgctcatcagacccgccacggctcgtgaaatgccacgggtcaggaggatcccagcagtggacctttgggaaaaacaatcggctataccaggtgtcggttggactgtgcctgagagcagtggatcccctgggtcagaagggctctgtcgccatggcgatctgcgatggctcctcttcacagcagtggcatttggaaggttaaggtggatgctgtggcgggaacgttgcttcatcaggcgttgcctccggtgtggagtttggggctttaggaaagcctgggttgggtggagcagaaccatcttggagaagatgacagttccctgtcctcccggagatgcctgggtgtgttagcagaggtgacacgtgtctgacagagacgggagctctgagtgtccacgggtgaagaagtgagtgtccacgggtgaagaagtgagtatgtttcacctggacattaaggtgatgtttgagctgctgttaaggaatttcttgcttatagaggcaaaccacagtatcattttaactctagaattgggcttgtacagaaggataaaacccaggaaaatggatatttctattcagatttatttatgcctctttttaatcccctttaatgatgcagtggtttttatctgatcaggaacttgtcatgatttcctttcttagacttcataggagatagtgctttaaaaaaaaaaaaaaacttctattatttgtttagtatgttgtaagtagatcattttaaaaaactgaatctatattatgtttaacttcagaaggcatcatttataagacagtatggcagttaattataaaattattttgatgaattatgatacaatctacataataaagaatccttttgattaaaaaaaaaaaaaaaaaa

SEQ ID NO: 69 - DNA, 2770 bp, Homo sapiens
atgtgggggcgcacggcgcggcggcgctgcccgcgggaactgcggcgcggccgggaggcgctgttggtgctcctggcgctactggcgttggccgggctgggctcggtgctgcgggcgcagcgtggggccggggccggggctgccgagccgggacccccgcgcaccccgcgccccgggcggcgcgagccggtcatgccgcggccgccggtgccggcgaacgcgctgggcgcgcggggcgaggcggtgcggctgcagctgcagggcgaggagctgcggctgcaggaggagagcgtgcggctgcaccagattaacatctacctcagcgaccgcatctcactgcaccgccgcctgcccgagcgctggaacccgctgtgcaaagagaagaaatatgattatgataatttgcccaggacatctgttatcatagcattttataatgaagcctggtcaactctccttcggacagtttacagtgtccttgagacatccccggatatcctgctagaagaagtgatccttgtagatgactacagtgatagagagcacctgaaggagcgcttggccaatgagctttcgggactgcccaaggtgcgcctgatccgcgccaacaagagagagggcctggtgcgagcccggctgctgggggcgtctgcggcgaggggcgatgttctgaccttcctggactgtcactgtgagtgccacgaagggtggctggagccgctgctgcagaggatccatgaagaggagtcggcagtggtgtgcccggtgattgatgtgatcgactggaacaccttcgaatacctggggaactccggggagccccagatcggcggtttcgactggaggctggtgttcacgtggcacacagttcctgagagggagaggatacggatgcaatcccccgtcgatgtcatcaggtctccaacaatggctggtgggctgtttgctgtgagtaagaaatattttgaatatctggggtcttatgatacaggaatggaagtttggggaggagaaaacctcgaattttcctttaggatctggcagtgtggtggggttctggaaacacacccatgttcccatgttggccatgttttccccaagcaagctccctactcccgcaacaaggctctggccaacagtgttcgtgcagctgaagtatggatggatgaatttaaagagctctactaccatcgcaacccccgtgcccgcttggaaccttttggggatgtgacagagaggaagcagctccgggacaagctccagtgtaaagacttcaagtggttcttggagactgtgtatccagaactgcatgtgcctgaggacaggcctggcttcttcgggatgctccagaacaaaggactaacagactactgctttgactataaccctcccgatgaaaaccagattgtgggacaccaggtcattctgtacctctgtcatgggatgggccagaatcagtttttcgagtacacgtcccagaaagaaatacgctataacacccaccagcctgagggctgcattgctgtggaagcaggaatggatacccttatcatgcatctctgcgaagaaactgccccagagaatcagaagttcatcttgcaggaggatggatctttatttcacgaacagtccaagaaatgtgtccaggctgcgaggaaggagtcgagtgacagtttcgttccactcttacgagactgcaccaactcggatcatcagaaatggttcttcaaagagcgcatgttatgaagcctcgtgtatcaaggagcccatcgaaggagactgtggagccaggactctgcccaacaaagacttagctaagcagtgaccagaacccaccaaaaactaggctgcattgctttgaagaggcaatcattttgccatttgtgaaagttgtgttggatttagtaaaaatgtgaataagctttgtacttattttgagaactttttaaatgttccaaaataccctattttcaaagggtaatcgtaagatgttaacccttggtatttagaaaattaaaaccttataatatttttctatcaagatgtatattttacagtcgtgccttttactctcattagcaaaaaagataaagattttattttggtatttacaagaattcccaggtacgaagatatctgcatgggtggaaatcaggttcaagcaacgtactttgcattaactgataatacctcagctgcggggttaaagttttcccagtatagagagactgtcactaggaacattgtattgatttattcaggtcattgagatcttctagatgtattttaaaaagaatgctttttggttatgtgttgctaccacagttaacactccataatgttcatgtcagccaaagaggactaaccaaagctgaaatctcagagaacaatttgctttactaagctgagtcaacttgagagcgaacttctaacaatgccgcactgtagtgtggctggttctaccactatgactttaaaacatgtttatatcatttttaatttttatgatacggtagtgtcagggagaaatgtaatgttctatatgaaattcctttttcaagtttgttcattaataacagttattaatttaaatcagcgttagagtttgtgctgctgcaactgctgtgaaaatttctctgagtaattctgatttgtgaatgatcccagaccaaccctgagattttgtcaacctgattaagtcaatatgaatgattaaaaagatgtgagaacaaaaaaaaaaaaaaaaaaaaaaaaaaaaaaaaaaaaaaaa

SEQ ID NO: 70 - DNA, 4447 bp, Homo sapiens
atgcggcggcgctcgcggatgctgctctgcttcgccttcctgtgggtgctgggcatcgcctactacatgtactcggggggcggctctgcgctggccgggggcgcgggcggcggcgccggcaggaaggaggactggaatgaaattgaccccattaaaaagaaagaccttcatcacagcaatggagaagagaaagcacaaagcatggagaccctccctccagggaaagtacggtggccagactttaaccaggaagcttatgttggagggacgatggtccgctccgggcaggacccttacgcccgcaacaagttcaaccaggtggagagtgataagcttcgaatggacagagccatccctgacacccggcatgaccagtgtcagcggaagcagtggcgggtggatctgccggccaccagcgtggtgatcacgtttcacaatgaagccaggtcggccctactcaggaccgtggtcagcgtgcttaagaaaagcccgccccatctcataaaagaaatcatcttggtggatgactacagcaatgatcctgaggacggggctctcttggggaaaattgagaaagtgcgagttcttagaaatgatcgacgagaaggcctcatgcgctcacgggttcggggggccgatgctgcccaagccaaggtcctgaccttcctggacagtcactgcgagtgtaatgagcactggctggagcccctcctggaaagggtggcggaggacaggactcgggttgtgtcacccatcatcgatgtcattaatatggacaactttcagtatgtgggggcatctgctgacttgaagggcggttttgattggaacttggtattcaagtgggattacatgacgcctgagcagagaaggtcccggcaggggaacccagtcgcccctataaaaacccccatgattgctggtgggctgtttgtgatggataagttctattttgaagaactggggaagtacgacatgatgatggatgtgtggggaggagagaacctagagatctcgttccgcgtgtggcagtgtggtggcagcctggagatcatcccgtgcagccgtgtgggacacgtgttccggaagcagcacccctacacgttcccgggtggcagtggcactgtctttgcccgaaacacccgccgggcagcagaggtctggatggatgaatacaaaaatttctattatgcagcagtgccttctgctagaaacgttccttatggaaatattcagagcagattggagcttaggaagaaactcagctgcaagcctttcaaatggtaccttgaaaatgtctatccagagttaagggttccagaccatcaggatatagcttttggggccttgcagcagggaactaactgcctcgacactttgggacactttgctgatggtgtggttggagtttatgaatgtcacaatgctgggggaaaccaggaatgggccttgacgaaggagaagtcggtgaagcacatggatttgtgccttactgtggtggaccgggcaccgggctctcttataaagctgcagggctgccgagaaaatgacagcagacagaaatgggaacagatcgagggcaactccaagctgaggcacgtgggcagcaacctgtgcctggacagtcgcacggccaagagcgggggcctaagcgtggaggtgtgtggcccggccctttcgcagcagtggaagttcacgctcaacctgcagcagtaggagggtccgggaggccctgccgtcctgtctcctgcaccattgggtggagtctggtgatcgcattattgattatgtttcttaaactttctgcgaaactaatatacctcagtattccatcatggtctgaaagtcaaacttcggcaaggcacggacgactgtgcagacacatcagcggcaagaagcgagaactgccctccccctcctctcggtgcagccagccgggcccccttccccaggccggagcgcccctcttccttccagctttcacttctgccggtccgcaactgagtgacacccagcgacaaccgactggggagtggtagaagcaactgaacggatgcgtgcgagctgaggacagggcgggaggaggggcacacatgccccaggggagcgaggagaactcttgaaatctccattttcaatcccttcgaaatcacgtatggtttccacaaagccgagtcgtgtcacgtggcaggtttacgtcaatagtccctctctctgctcctccattcgcaagtgtcttcctgggccagactcccctccccctcatgtacttgctatattgaggatgaagttttctatggtgggacactaaatataaagctatatagagaaagaatgtacggtcagttccctatggtttctgtagatcatcgtcatcttgtatattccccacaaagccgttcgcagcttccgggagaaggggccagagcccggtatggggcaagttctctaacagagggaggaggtggcctttgtgtcccctggaggcccccggatccagccagttggtgctactgctgtggccagctggggggcttcctccagaccaccggcctcggccccggcatccctgttgggcgtcagcctgagagtccctactgtgcgtcagaatccaccttgcgtgctgtgcgtatctgtgaacctgggagacggttacttattttgacagatatcactttgggtctttttacattaaatttcttttctctaaggaatataagacataccccatagctctgtgtgagccagcaataccgctgccccctggcgacagggcagaccaatgatgccaggcagctgtcacacgctagtattggcttcattgtgatctgagccctgcacgctgggccttcagaattaatggccagcagtgtcagggatgagcccgtcagccagggcacaggcctggctcacagtcctgcacacctgctggcctgggggagctccagccaggcagcgagtcctgccccgcccgcagctccctcccacaccccgcctggccaagatgactgcttcagggggctttggggaaagaattaggaagggtcagaaccaaacaatacctgctcatttacactgaggattcagggcgggagacaggagccttggggtcctgttaaaccacagacagttatgaactgaaagtcataacggggagaggtgcctggcttctacctgggtgctcaggaatgttcctcctcacccctgccactctgtggtcggtgccctgcttcctcctccactcctggccgccttctccagcgccgcacacacagatgctcagtctcagagaggctggcacggcctggcagtctgagaaaatcgtcagttagccactgcaggccctcggtgggacagcggcggccttggattaggagccacctgggagtgtgccggtgccatgctcctccctgtgtcttgtatgaaagggccactgtgtgtcttcctccccggcgggagcccacatgttgcactgtaggacagcggcccgaagtggaagcctggctggaggctgccctataggtctctctccgcctcccctgccatgcaaccagatgtgtgtgaatgggccacgtgcccccacgctggatactccgccacgcttctgtctttcacggtgggcgctcggggggagctgagaaaaccccttagtactgtgcgagctgtggagtgcaggccagagcagggtgtgcgtagcccccagcacccaggttcttctgtcagaccctgtgacctgcgagctgctactactgtaaggagggaaatggatgaatctggctcgttttaaaatcacgttttctgacgaatcctttgccccttcacctttaccccgcccgcacccctaggccctctcagccttcctatcatcccacgtgtctacccagacccttgtgcggcccatgccctgggggcggcgtcctgtccctgagctgggaggcggctttggatggtccgggcgtcaagagcaggggtgggccggggaggggtcctttgcggtgagctatgtttacattgacacagtgtgccaaagtgacttactgcggttgcgttagtttctgtcatcaggacactatctcaccctcccactcctgtttttaaaactcagaattctttcctaagagcccttcgaagcaaagcgtgccgaagttagttgtcttctctgtgctggtcctttcttatgtcctcataaaagctcagatgatggtatctgtgagtatgttttgcaaattcaaaatatagtttggtaattttttttgccagttgatttttaaaaagaactgctgtacagagctagtactttgtccattttatgaatggaaaccatccttgaaaattgtttaacttaaataaagagaagatactttctagataccgctctttgctggccagagtctgtcctggtgtgtgaaggctgggtggggtgggtgtggggactgggattggggtc

SEQ ID NO: 71 - DNA, 3874 bp, Homo sapiens
atggctcacctaaagcgactagtaaaattacacattaaaagacattaccataaaaagttctggaagcttggtgcagtaatttttttctttataatagttttggttttaatgcaaagagaagtaagtgttcaatattccaaagaggaatcaaggatggaaaggaacatgaaaaacaaaaacaagatgttggatttaatgctagaagctgtaaacaatattaaggatgccatgccaaaaatgcaaataggagcacctgtcaggcaaaacattgatgctggtgagagaccttgtttgcaaggatattatacagcagcagaattgaagcctgtccttgaccgtccacctcaggattcaaatgcacctggtgcttctggtaaagcattcaagacaaccaatttaagtgttgaagagcaaaaggaaaaggaacgtggggaagctaaacactgctttaatgctttcgcaagtgacaggatttctttgcaccgagatcttggaccagacactcgacctcctgaatgtattgaacaaaaatttaagcgctgccctcccctgcccaccaccagtgtcataatagtttttcataatgaagcgtggtccacgttgcttagaactgtccacagtgtgctctattcttcacctgcaatactgctgaaggaaatcattttggtggatgatgctagtgtagatgagtacttacatgataaactagatgaatatgtaaaacaattttctatagtaaaaatagtcagacaaagagaaagaaaaggtctgatcactgctcggttgctaggagcaacagtcgcaacagctgaaacgctcacatttttagatgctcactgtgagtgtttctatggttggctagaacctctgttggccagaatagctgagaactacacggctgtcgtaagtccagatattgcatccatagatctgaacacgtttgaattcaacaaaccttctccttatggaagtaaccataaccgtggaaattttgactggagtctttcatttggctgggagtcgcttcctgatcatgagaagcaaagaaggaaagatgaaacctacccaattaaaacacccacttttgcaggaggacttttttccatatcaaaagaatattttgagtatattggaagctatgatgaagaaatggaaatctggggaggtgaaaatatagaaatgtctttcagagtatggcaatgtggtgggcagttggagattatgccttgctctgttgttggacatgtttttcgcagcaaaagccctcatagctttccaaaaggcactcaggtgattgctagaaaccaagttcgccttgcagaagtctggatggatgaatacaaggaaatattttataggagaaatacagatgcagcaaaaattgttaaacaaaaagcatttggtgatctttcaaaaagatttgaaataaaacaccgtcttcggtgtaaaaattttacatggtatctgaacaacatttatccagaggtgtatgtgccagaccttaatcctgttatatctggatacattaaaagcgttggtcagcctctatgtctggatgttggagaaaacaatcaaggaggcaaaccattaattatgtatacatgtcatggacttgggggaaaccagtactttgaatactctgctcaacatgaaattcggcacaacatccagaaggaattatgtcttcatgctgctcaaggtctcgttcagctgaaggcatgtacctacaaaggtcacaagacagttgtcactggagagcagatatgggagatccagaaggatcaacttctatacaatccattcttaaaaatgtgcctttcagcaaatggagagcatccaagtttagtgtcatgcaacccatcagatccactccaaaaatggatacttagccaaaatgattaagtgttccttaaaattaagttgaaaaaggaaatattctttctcataaaactgtgactaggcatacactgtagtttttgaaaattatgcaaaagcagctaaatgtaacttattccaagtgcatttttcttatttatatctttatgtagcactactacagaaattctgcaagtttctgtttcaaagcacaataactagtaataccaaagactatttcaaaatgtccagatgtaggggaagagatgtttacagtatgatgaaaataattttccaagtaaagtgatgtttgtgtgttttgtacacttagggatatatatatatagctacattcacacactcacaatttaaaatatttcccctagttttttggggggataggaagaaagatttgttactgtatttttttaactacataaaaatagatcaataaatgtcagcattggcctctgtgtacaaaccaagagcttttacagatccagaatttattagtttaaaatgcaggtgaacttttttttgcgtttggtttacttgtctgtcaaatgtttccttaaacatgaaactgaataaggagaagagtatttttaacacttaaatttcttggcaaattttaaaacattttttagtctgtaatacactccacttgaagcacttaagtcttccttaaatgacttttcttaagtaatgatactgtgtgttttcccaaagcacttttaaaaaaatttttataaattactatctgttgaaaaggtgtccttttcctttcttctagtattttttttcttaccaaaattcactaatcttgaatgtttgtgatattaaatttcaaatgcagaatacttgactcatttaaagctaaattttgttactgattcaattataattgtaatggatttttgactttgtaatggattcttttcatcaaaaagccttattattttttatctatgtggaaaacacaataaaaaatcctcaacactattgtaatcatttggttaagtgcttattcctcttttgggtaaaatctgtaattgataataggtgggggaaaatgaattttgtatgctgaatttctaagcgcctattgtttgtaaaaccatcagatatttcttatggcacaaaaaatgaggaatagcaaaattcctgtgttcaatatttagaaaattttgtattaatttctgataaagttccttaagcatctgatagaatgatgttttaaaaaaatttgacgcttgcttaggagatttaccactttttttttttgtttttcgtcattttatatttagatctcctgtattcttgttcccgaagtaaaatacgatcggtttcatattttaaatctggcagagcctcagctgtacgaaaaagagcatatactggttattgaccctatcttctcattgtttgtttgtaagtttgaatttgtattaaaaagcctgcattctgagctggacatggtggctcagcttctaatcccagcactttggtaggcaaaggtgggaggatcatttgagctcaggagttccagaccagcctgggcaacatagcaaaatctcatctctacaaaaagtaaaaattaaaaaatgaaattaaaaataaaattacctaggtgtggtggcacgcatctgtagttccagctatacaggaaggtgaggcagaagcattgcttgagcttgggagatcgaggctacagtgagctatgattacaccactgcacttcagtctgtgtgactgagcaagactctttcaaaaaaaaaaaaaagcctacattctccagttgattatttccaactaatgtgtattatgtgcctaattttctatcagaagttgtattaagcccgttttcacactgctgttaaagacatacctgagactgggtaatttataaagaaaaataggttcaatggacccacaggtccgcgtggctggggaagcttcacaatcatggcggaaggtgaaagcatgtcttacgtggaag

SEQ ID NO: 72 - DNA, 5360 bp, Homo sapiens
gggagagaggagttgggctgtgccggaggccgaggaccgagagggctcaggtgacccctggaaagcctgggtggctggaaaggagcctagcgcctgcatgaaaggaagaacctgctgggaagtacctgagctcgagctgtgggttccgccgcccttcccctgcgtggtggcttggtggccgcgtctgcgcctcagccctgagaatccggatggcggtgaggtggacttgggcaggcaagagctgcctgctgctggcgtttttaacagtggcctatatcttcgtggagctcttggtctctacttttcatgcctccgcaggagccggccgtgccagggagctggggtcaagaaggctctcagacctccagaaaaatacggaggatttgtctcgaccgctttataagaagccccctgcagattcccgtgcacttggggagtgggggaaagccagcaaactccagctcaacgaggatgaactgaagcagcaagaagaactcattgagagatacgccatcaatatttacctcagtgacaggatttccctgcatcgacacatagaggataaaagaatgtatgagtgtaagtcccagaagttcaactataggacacttcctaccacctctgttatcattgctttctataacgaagcctggtcgactttgctccgtaccattcacagtgttttagaaacttctcctgcagttcttttgaaagagatcatcttggtggatgacttgagtgacagagtttatttgaagacacaacttgaaacttacatcagcaatcttgatagagtacgcttgattaggaccaataagcgagaggggctggttagggcccgtctgattggggccactttcgccactggggacgtcctcactttcctggattgtcactgtgagtgtaattccggttggctggaaccgcttttggaaaggattgggagagatgaaacagcagttgtgtgtcctgttatagacacaattgattggaatacttttgaattctatatgcagataggggagcccatgattggtgggtttgactggcgtttaacatttcagtggcattctgtccccaaacaggaaagggacaggcggatatcaagaattgaccccatcagatcacctaccatggctggaggactgtttgctgtcagcaagaaatattttcagtaccttggaacgtatgacacaggaatggaagtgtggggaggtgaaaaccttgagctgtcttttagggtgtggcagtgtggtggcaaattggagatccacccgtgttcccacgtgggccatgtgttccccaagcgggcaccatatgctcgccccaatttcctacagaatactgctcgggcagcagaagtttggatggatgaatacaaagagcacttctacaatagaaaccctccagcaagaaaagaagcttatggtgatatttctgaaagaaaattactacgagagcggttgagatgcaagagctttgactggtatttgaaaaacgtttttcctaatttacatgttccagaggatagaccaggctggcatggggctattcgcagtagagggatctcgtctgaatgtttagattataattctcctgacaacaaccccacaggtgctaacctttcactgtttggatgccatggtcaaggaggcaatcaattctttgaatatacttcaaacaaagaaataaggtttaattctgtgacagagttatgtgcagaggtacctgagcaaaaaaattatgtgggaatgcaaaattgtcccaaagatgggttccctgtaccagcaaacattatttggcattttaaagaagatggaactatttttcacccacactcaggactgtgtcttagtgcttatcggacaccggagggccgacctgatgtacaaatgagaacttgtgatgctctagataaaaatcaaatttggagttttgagaaatagagcacaacagcactttcgtcatgagctgacagtagtgtcaagaaagtcaaagagccttaagagcctcagtgaagattgtattttattttatcaaaagccacctagcagtcatctgtggagcactggaaagctggggttcattttggtatatcacactgaaactgggtacccagagtgctgctgtttaatatttcacaatgccttacttattggttgttttatataagagttttgtcaatatggtctcttcttaaaagaagttgactatgaattgaaacacacaaaacatttaagtgccagacttaatattaaagaatgtaaaggtccaagtaaaatgaggtatgatttatgttgatgtgtaagttcaccgcacatcccactttttaacaaaactcatgaatgtgcagtttgagccattgctattttgattacatagaatttgtatttcttttttagccagcacattaaattttagattttattttttaatctaatttttttctaatcaaaaagaaaattgagcttaaggcaaaaggcctggttttagagatatgtgtaattggaagagggcatttgtttgagtgtgagtttggaggcctttttaacatgcagacatacccatatttaaatgaaatggggagatatttacattccgtactttgtaaacttgagctattggacttcactgatgtatatattaatacctcagattcctctgattttgtaagctgtcttctctgtgaacgtgtttgtgtgtgtagggcattttctgattgcacttccttaagttatgaatgtactagaaagggactcatccagaatactatgcctccctttgttaatgcttaatcatttaaagtaaacacaattgaagcctctctgaagttaaacccaactatgtttattaaaatgtgtgaaactgaaagtgggctaggttctaccaaggctgtggaactctcctacgagttctgctgatcaggaaatttaagaatttatcttaaaaatgcaaggaaaaaagactgccttggcaattgtgaatggtgctttcaatctcctagcaccgagcctggcacttaggcagctttcagtaagtgggtgaatgaatgactgaatgaatgaatgaatggctcagctgaggaatgtaactttggtcaagttattatgatgtgtttgggcttagttttctcattggtaaaatgtgggtgctggattggatcttaaagatcccttccagctctgaaatgctgattgtacagtatattcttcccagattgactcactgtgcaatctttacaatactttttatcttttcacttttgacataggtaatgttgttgagcagttgagcaatgttcagtccagttgtgaagctggagaagagaaatgggttttaaaaattaagtgaggggaggccgggtgcggtggctcacgcatgtaatcccagcactttgggaggccaaggcaggtggatcacgaggtcaggagatccagaccatcctggctaacatggtgaaacctcgtctctactaaaaatacaaaaaattagccagctgtggtggcgggcgcctgtagtcccagctactcaggaggctgaggcaggagaatggcgtgaacctgtgaggcagagcttacagtgagccgagatcgtgccactgcactccagcctgggcgacagagcaagactctgtctcaaaaaaaaaaaataataataaaataagtgagctgaactcacctgaagtggtttacttctgtgggttaagaagttctagtcagtgttcatagtcgtttcgttttgataattgttgaaccaattttgtttttaaaacctttagactctgaaagtaatattttgactaagaatgtaaatatttccaaactaaattactcgggaagtaaacgctttttttaaaagtatttttactggttttataccaatattatatgcagaaatcacaggatgaatttagaattaaatctcaattagttcactttggcctagatttatgaaaaatgcatgcctcgtaaagagtccactgtattcacgagtaaagttgcttttagtgttcacttgatgacttggagagtaggaattttgcaaaatctgaatttaaggaaattctttaggataaccatttcaaaaaataaaattgctatgcaatcttgaatattttctcttttgcctcgtaaaatgaaaatgcattcacagtttctgtaaattatttagcagccttaaagtttatcaaaaaattgtccagattccacgtgcagcatgcttggccctgcatttaatttaagaaggattaataataatgctctgaatttttcgaaagggattctcctaaacccacccacttctcttgcccaggctgctttttaaaaatatttttttattttttacttatttttaaattttctctttttatttatttttggttttcttgttagccacctgttatatgggagaacgaaaattgttatattttgaaagtacttattacattatttttattttagtatcttgatgctcctgtcaaaagggaaatgaggcttttaaaaataaagtaccttaattctttattgactttttgccctaaattgctaggtgtgacccagcaatcttttaggaagagattttacagtggtgctttatttatatcaataatccagtatagttaggctgttcattcctcataatagagtacataacagaaaagtgggactttcacattttcatatttaggcacgttccaatttaattccaaaaatactctgtaattctacatctaaaaaaaccgattccctaattcgaatttattggtaccaaagctctctttggctatagacaattaagagttgaccttttaagttaatgtatatgcttaaaaacagttttaggaaaatatttggtagacaaagagtttcaactttaaatgttcactatgtcatttagtgtccaactttacggataggttgactatctaaataggcatttttagtcattaaaaaaaatctagtcaccaggaggatccctataactcaaaataacttgtttgtaaaagaaaatttgtttacttacccattagtaagttcctgcatattcattataagatggcaaatcaaacttttctaggatgaagacagcttatttttaagttgtatagtcttagttggtttagggtctcaattttaattaataaaatacttggtttttatttgcttgtccttttgaattcctgttttaataattttaaaatgagcacaaagaacgttgaagttcagattaatctcttctgaatgatgtttttttcctctgtgatgagttgtttctgacttttttccttttgtatttgtaatgttgattaagatgtaaaataaaaagtgtgcctgattatttttgcaaaaaaaaaaaaaaaa

SEQ ID NO: 73 - DNA, 4520 bp, Homo sapiens
ccaggctggtccctcctgccttcgctctctgctggtcgcggtggcctgtagctcctccctcggtaggacccccctccaccttggcgcttacgagatgaatgaggagcccagacctctggaacttggagggttgttcagattcccaggctgacaaaaaggagaaacagcttttacttgcatccagggccaatcatcgcagacccagacgtctgcagagggctgaggccccagcttgtggccaccacaacgtatcaagctatctccagggttgggctcaggactcagagctgacgcagctggggtgccccttggttctggaggatgaggctcctccgcagacgccacatgcccctgcgcctggccatggtgggctgcgcctttgtgctcttcctcttcctcctgcatagggatgtgagcagcagagaggaggccacagagaagccgtggctgaagtccctggtgagccggaaggatcacgtcctggacctcatgctggaggccatgaacaaccttagagattcaatgcccaagctccaaatcagggctccagaagcccagcagactctgttctccataaaccagtcctgcctccctgggttctataccccagctgaactgaagcccttctgggaacggccaccacaggaccccaatgcccctggggcagatggaaaagcatttcagaagagcaagtggacccccctggagacccaggaaaaggaagaaggctataagaagcactgtttcaatgcctttgccagcgaccggatctccctgcagaggtccctggggccagacacccgaccacctgagtgtgtggaccagaagttccggcgctgccccccactggccaccaccagcgtgatcattgtgttccacaacgaagcctggtccacactgctgcgaacagtgtacagcgtcctacacaccacccctgccatcttgctcaaggagatcatactggtggatgatgccagcacagaggagcacctaaaggagaagctggagcagtacgtgaagcagctgcaggtggtgagggtggtgcggcaggaggagcggaaggggctgatcaccgcccggctgctgggggccagcgtggcacaggcggaggtgctcacgttcctggatgcccactgtgagtgcttccacggctggctggagcccctcctggctcgaatcgctgaggacaagacagtggtggtgagcccagacatcgtcaccatcgaccttaatacttttgagttcgccaagcccgtccagaggggcagagtccatagccgaggcaactttgactggagcctgaccttcggctgggaaacacttcctccacatgagaagcagaggcgcaaggatgaaacctaccccatcaaatccccgacgtttgctggtggcctcttctccatctccaagtcctactttgagcacatcggtacctatgataatcagatggagatctggggaggggagaacgtggaaatgtccttccgggtgtggcagtgtgggggccagctggagatcatcccctgctctgtcgtaggccatgtgttccggaccaagagcccccacaccttccccaagggcactagtgtcattgctcgcaatcaagtgcgcctggcagaggtctggatggacagctacaagaagattttctataggagaaatctgcaggcagcaaagatggcccaagagaaatccttcggtgacatttcggaacgactgcagctgagggaacaactgcactgtcacaacttttcctggtacctgcacaatgtctacccagagatgtttgttcctgacctgacgcccaccttctatggtgccatcaagaacctcggcaccaaccaatgcctggatgtgggtgagaacaaccgcggggggaagcccctcatcatgtactcctgccacggccttggcggcaaccagtactttgagtacacaactcagagggaccttcgccacaacatcgcaaagcagctgtgtctacatgtcagcaagggtgctctgggccttgggagctgtcacttcactggcaagaatagccaggtccccaaggacgaggaatgggaattggcccaggatcagctcatcaggaactcaggatctggtacctgcctgacatcccaggacaaaaagccagccatggccccctgcaatcccagtgacccccatcagttgtggctctttgtctaggacccagatcatccccagagagagcccccacaagctcctcaggaaacaggattgctgatgtctgggaacctgatcaccagcttctctggaggccgtaaagatggatttctaaacccactgggtggcaaggcaggaccttcctaatccttgcaacaacattgggcccattttctttccttcacaccgatggaagagaccattaggacatatatttagcctagcgttttcctgttctagaaatagaggctcccaaagtagggaaggcagctgggggagggttcagggcagcaatgctgagttcaagaaaagtacttcaggctgggcacagtggctcatgcctgaaatcctagcactttgggaagacaatgtgggagaatggcttgagcccaggagttcaagaccggcctgagcaacatagtgaggatcccatctctacgcccaccctccccccggcaaaaaaaaaaagctgggtatggtggcttatgcctgtagtcgcagctactcagaaggctgaggtgggaggattgcttgttccccggaggttgaagctacagtgagccttgattgtgtcactgcactccagcctgggcaacaggtaagactctgtctcaaaaaaaaacaaaaaagaagaagaaaagtacttctacagccatgtcctattccttgatcatccaaagcacctgcagagtccagtgaaatgatatattctggctgggcacagtggctcacacctgtaatcctagcactttgggaggccaaggcaggtggatcacctgaggtcagaagtttgaaaccagcctggactacatggtgaaactccatctctactaaaagtacaaaaattagctgggcatgatggcacgcacctgcagtcccagctacttgggaggctgaggcaggagaatcactcgaacccaggaggcagaggttgcagtgagccaagacagcaccattgcaccccagcctgagcaacaagagcgaaactccatctcaggaaaaaaaaaaaaaaaaaaagtatattctaacagacagatcagaggtctaagagatcctcccttgctattattacctgaagtctgtagaactgtttacagatatctccttgacaggtgtcctttatcttactttatctgtacagtaatcctgtgagaaagacaggacagaaaccactgtgcctattttacagatacgaaaactgagacacaggtaaaggggcttgtctgtagtcccatagctagcagatggctggagccaagactgaggctcgttcttcaatgctgagccagggctccttccgctgcaccacaagaacgctagaccactcgccaccagccttctcattccctcttcctccattctaatcatttctagctggctggcctccacagagcataggaaaacagccagggccgggcacggtggctcatgcctgtaatctcaacactctgggaggccgagccgggtggataacctgaggtcaggaattcgagaccagcctggccaacatggtaaaaccccatctctactaaaaatataaaaattagccaggcatggtggcgcacacctgtaatcccagctactcaagaggctgaggcaggagaattgcttaaatctgggaggcggaagttgcagtgagccaagatcgcgccactgaactccagcctaggcaacaagagcaaaactccatctccaaaaaaaagaaaggaaaaacagggccaggtagccattgtggagagagcacacttaggaatcctgggatgttagtgttaaaagaaagctcctggagccagtgattctcaggtttgtcccagaacccttttttctaagccccatataaaaggtagattaaaaaaacaaagtagcatgagtgaaattgagagagggacaggtaatgccttccagcccctaacttctaacaatctggaagcacaacgtgaaaatcacgtagcccaaccctatcattttcatattatgaaactgagtccaggtaagtgaatctgtccaaggtcacccagcaaggtatcagtagccctgagggtaaggactctgataaggctcgggagggtcctggaaagcctgaggcggcaggaagagtgtgcagagttgagcgtgtctggaaggctgatccactgctgggcccacatcaaagcccccatggggagcagacccgactgcacatggctcttttgctggaagaagagcatggctgcgcagaggactaaaatttcatctgggaaggcttcttttgactgtcagtagcaggatgtcaccagatgagggtgctatgggaccacagctgtctttgttcccattgcaactcaaccctgcgg

SEQ ID NO: 74 - DNA, 4266 bp, Homo sapiens
ccgggctgtgagtctctcgccgccggaggaagatgaggctgaagattgggttcatcttacgcagtttgctggtggtgggaagcttcctggggctagtggtcctctggtcttccctgaccccgcggccggacgacccaagcccgctgagcaggatgagggaagacagagatgtcaatgaccccatgcccaaccgaggcggcaatggactagctcctggggaggacagattcaaacctgtggtaccatggcctcatgttgaaggagtagaagtggacttagagtctattagaagaataaacaaggccaaaaatgaacaagagcaccatgctggaggagattcccagaaagatatcatgcagaggcagtatctcacatttaagcctcagacattcacctaccatgatcctgtgcttcgcccagggatcctcggtaactttgaacccaaagaacctgagcctcctggagtggttggtggccctggagagaaagccaagccattggttttgggaccagaattcaaacaagcaattcaagccagcattaaagagtttggatttaacatggtggcaagtgacatgatctcactggaccgcaacgtcaatgacttacgccaagaagaatgcaagtattggcattatgatgaaaacttgctcacttcgagcgttgtcattgtcttccataatgaaggatggtcaaccctcatgagaacagtccacagtgtaattaaaaggactccaaggaaatatttagcagaaattgtgttaattgacgatttcagtaataaagaacacttaaaagaaaaactggatgaatatattaagctgtggaatggcctagtgaaggtatttcgaaatgaaagaagggaaggtttaattcaagcacgaagtattggtgctcagaaggctaaacttggacaggttttgatataccttgatgcccactgtgaagtggcagttaactggtatgcaccacttgtagctcccatatctaaggacagaaccatttgcactgtgccgcttatagatgtcataaatggcaacacatatgaaattataccccaagggggtggtgatgaagatgggtatgcccgaggagcatgggattggagtatgctctggaaacgggtgcctctgacccctcaagagaagagactgagaaaaacaaaaactgaaccgtatcggtccccagccatggctgggggattatgtgccattgaacgagagttcttctttgaattgggtctctatgatccaagtctccagatttggggtggtgaaaactttgagatctcatacaagatatggcagtgtggtggcaaattattatttgttccttgttctcgtgttggacatatctaccgtcttgagggctggcaaggaaatcctccgcccatttatgttgggtcttctccaactctgaagaattatgttagagttgtggaggtttggtgggatgaatataaagactacttctatgctagtcgtcctgaatcgcaggcattaccatatggggatatatcggagctgaaaaaatttcgagaagatcacaactgccaaagttttaagtggttcatggaagaaatagcttatgatatcacctcacactaccctttgccacccaaaaatgttgactggggagaaatcagaggcttcgaaactgcttactgcattgatagcatgggaaaaacaaatggaggctttgttgaactaggaccctgccacaggatgggagggaatcagcttttcagaatcaatgaagcaaatcaactcatgcagtatgaccagtgtttgacaaagggagctgatggatcaaaagttatgattacacactgtaatctaaatgaatttaaggaatggcagtacttcaagaacctgcacagatttactcatattccttcaggaaagtgtttagatcgctcagaggtcctgcatcaagtattcatctccaattgtgactccagtaaaacgactcaaaaatgggaaatgaataacatccatagtgtttagagagaaaaaaataaaccaataacctacctactgacaagtaaatttatacaggactgaaaaccgcctggaaacctgctgcaactattgttattaactctgtatagctccaaacctggaacctcctgatcagtttgaaggacattgataaactgtgattttacaataacattatcatctgcagttactgtttacaagactgctttttaccttaaactttgtagatgtttacatcttttttgttgtgttttaaagatgatgttggtaatttgtgccttttagctctgttttattaaacagagttaaagcatgttgtcttctttgggattacactcaggggttctgaaaggcagtttgatttttatttttaacacacttgaaaaaaggttggagtaaccagactttcatatataacttggtgattatcaacctgttgtgtctttatttaattttacatctttttgaagcactgccacaggttattagccaaggtggccttccttcacagtcatgctgcttttttgaaaggtgaatttcaacacatttagtgcctctttcatttctcagtatatatttcaagagcttgtgatgaaatctataggatggtaatgatggacttgtcacctgtatggggaatacttttactactcagaaatgaatttatgtgctgccatttgctataaagttgaactttgtatggcttgaaaaagaaatgaccatatggaacatcccaaggctgtcccataagggttggaagttgtgtagcattcactcccttacctactggcattcccagtgccctctgtccatacctacttctaggattgcaaagggagtcttccaactagaagaaaaattgtccactgacatttgggatttacttttctccaatacctgccaatacagaaaactattatcagttgttattgttatcccttgaaaagcgagggtgacaaaaacaacaaaacaccgttataaacacatcaaaggttcattctgactgaggtaagactttccaagcccttgttagattaggccttataaaacttgtgtgcattataacctaagctgtgcaacctggtgaagccaagagtgaactgatgtttcatttatattttcatccaaatgacattatctgcacgtttttaaaatttaaaaacaaaggactatttaaaaatacagtttattaacaaacgtgaaactactttctgttacattaggtgttccctagtgtttcttaatttctttttagaaagtgtatttttattagtatttttccggtgaacagaagatttgtttggatttaaacatttactaagacagtacctattaggaaaaccaaatattgcaaatggtcaattcgattttaatttctcaaaagatactctgttatccagaagattaaaatgcctacattgagtgcttaaaaaaaaaaacaactgtgatgatgtgagcagaatggcaagtaagttaagcatttttgatcctgtaatcatggtatcattacaatgaaaggaattcacaaactactgccagaggaagtttgttttttaatttaagagggaaatataacctataaatttgtttcttccaagcttagctcttaaatttgggagactcaaagttaaacatcctcaacagagttttatttataattttgaattgtcaatttgtattttgctactgatctgtgatcaaccattttaactttcatctctagggatgtttaacatttataattgcaaaataaaccaactataaaaaaagaaactaagagagaattggtactttaattacttgtgtgtttgcaaataggctccattttccatgttgagtagattataaccttattaactaggcataggcctaagaaaggtggcaatgaactgtgcatgtaaattttaaatgggtactttgtgcaattcgttaaaagaagatactctatgaatatgattctatatattgaaatcagaaaacctaccaaacaaaaacatcagaagctgctgccataatgactattttctactgtaggctgctttggaaataattcccatatccttgctttgtaagttggtaatatcactatgcatttctacacattttataaatttgatttatgcagattttgatacactgtatgtttctgtagaaattgtataaatattcaaaattttattaggataaatttgagaaacttacgtatatcttaattctgggttgcttgttttttaggtgacaaaaataaaatattgtattttaattc

SEQ ID NO: 75 - DNA, 2135 bp, Homo sapiens
ttcccacaaaagctaggctggttctgattcttaacctgctccagcagtgacacactcagtcccacagggagtggacgacccccaggaagaagatgatgttttggaggaaactccccaaagccctcttcattgggctgactctggccattgctgtcaatctccttctggtattttctagcaaggggactttacaaaacctgtttacgggtggtctccacagggagcttcctttacatctgaataaacgctacggggcagtgataaagagactctcccacttggaggtggaattgcaggatctgaaagaaagtatgaaattagctctgaggcaacaagaaaatgtgaacagcacactgaagagggcgaaagatgaagtacgccctcttctaaaggcaatggaaaccaaggtgaatgagacaaagaagcacaaaacccaaatgaaactcttcccacactcacagcttttcaggcaatggggcgaggatctttctgaggcccagcagaaggcggcccaggacctcttccggaagtttggttacaacgcgtacctcagcaaccagctgcctctcaatcgcaccatccccgacacgcgagactacagatgtcttcggaagacatatccttcccaactcccatccctcagtgtcattctcatattcgtgaatgaagctctgtccattatacaacgggccatcaccagtatcatcaaccggacgccctctcgattgttgaaggaaatcatcttggtggatgatttcagctcaaatggagaactaaaggtacacttggatgagaagattaagctttacaaccagaagtatccaggactactgaaaataatacggcatcctgaaaggaaaggtcttgctcaagcccgcaacactggctgggaagctgccacagcagacgtggtcgccatcttggatgctcacattgaagtcaatgttgggtgggcagagccaatcttggctcggattcaggaggaccgcactgtgattgtgtctcctgtgtttgacaacattcgttttgacaccttcaaactggataagtatgaactggcagttgatgggtttaactgggaactctggtgccgctacgatgcactgccacaagcctggattgatctgcatgatgtcactgccccagtgaagagtccttcaatcatgggcatcctggctgctaacaggcacttcctgggagagatcgggtctctggatggtggaatgctcatctatggaggagagaacgtggagcttagcctgagggtgtggcagtgtggagggaaggtcgagattttgccctgttcccggattgcccacctagagagacaccacaagccctacgccttggatctcaccgctgccttgaagcgcaatgctctgcgagtggccgaaatctggatggatgagcacaaacacatggtctacttggcctggaacatacctctccagaactctggaatagattttggagacgtttcttccagaatggcactccgggaaaaactgaaatgtaaaacttttgactggtacctgaaaaatgtttatccactcttgaagccactccacaccatcgtgggctatggaagaatgaaaaacctattggatgaaaatgtctgcttggatcagggacccgttccaggcaacacccccatcatgtattactgccatgaattcagctcacagaatgtctactatcacctaactggggagctctatgtgggacaactgattgcagaggccagtgctagtgatcgctgcctgacagaccctggcaaggcggagaagcccaccttagaaccatgctccaaggcagctaagaatagactgcatatatattgggattttaaaccgggaggagctgtcataaacagagataccaagcggtgtctggagatgaagaaggatcttttgggtagccacgtgcttgtgctccagacctgtagcacgcaagtgtgggaaatccagcacactgtcagagactggggtcagaccaacagccagtgatcctcagatggtgctggatctgggtcatcaattcttgcaagtggaatggcttctactcctaacactcccagcttctttctcaatgagaaagaaagcatgtgtatgtctgtttatggcgacttcaggtgg

SEQ ID NO: 76 - DNA, 1741 bp, Homo sapiens
ggcgcttctgaagacgggtgggcagacgatggaggacgaggctctgtcccgcccctgcagcttccttcgttccggccccttccagcgaagggcaggctccgagcagagacaacagacagaaacccagaaaccacctgccacgatgtgaacctgatgcagaaacgcggttcgctccctcgggatgcaaaggccaacttcagcctggcacggcggcgccgcggactccaccatcccggggaaggagccggacccctgtgtggcagtgtggcggcagcatggaggtgctgccctgctcccgcgtggcccacatcgagcgcaccaggaagccctacaacaacgacattgactactatgccaagcgcaacgccctgcgcgccgccgaggtgtggatggatgacttcaagtcccacgtgtacatggcctggaacatccccatgtcgaacccaggggtggacttcggggacgtgtctgagaggctggccctgcgtcagaggctgaagtgtcgcagcttcaagtggtacctggagaacgtgtacccggagatgagggtctacaacaacaccctcacgtacggagaggtgagaaacagcaaagccagtgcctactgtctggaccagggagcggaggacggcgaccgggcgatcctctacccctgccacgggatgtcctcccagctggtgcggtacagcgctgatggactgctgcagctggggcctctgggctccacagccttcttgcctgactccaagtgtctggtggatgacggcacgggccgcatgcccaccctgaagaagtgtgaggatgtggcgcggccaacacagcggctgtgggacttcacccagagtggccccattgtgagccgggccacgggccgctgcctggaggtggagatgtccaaagatgccaactttgggctccggctggtggtacagaggtgctcggggcagaagtggatgatcagaaactggatcaaacacgcacggcactgaccccacctccgcccggacccccacagacctcgggaaggcgctgggccgagccagtgtggctgagtgaccggggtgtgcccggcagacacagcaggacagggctctatgtgcggccaggacagcagaggctgaggggccggggtgtggctgagtgaccagggtgtcacccactgcatctggagtacagcttctcctaggacaggcggctctacccgagggagggcgtctggggacagtgatgccaactcaaacacgtgccttctccacggtatctcctggccaggctgctgggacagccgccgcctctgcatgtaccacagccccccacgccccatagggaggccaagccccggaccatgcaccaggctgcaccctggtgtcttccacccgcaggcctcccatgctccaagcagcctcccccagcacttgcggccgctcagccctccaaccaagacctaagtcacacatcataatgcagctccttgtggtctggtaagaggggtgctggaggacatggacagcgacaaacctgaggccgtgtctaggaggctggcacgactgcttcagcagagaccaaataaagagaggattaggcagcagcactgtgtgtgtcttcctgggagccgagctgggggttggggcccggtcccacctctttcccaggcacctgggccctgccgcagcccagccccttgcctgttttaataaatacagttttattggcgcccagccacaaaaaaaaaaaaaaaaaa

SEQ ID NO: 77 - DNA, 3435 bp, Homo sapiens
tcaatgcactgttcaaggatgtttgagagattttctgtcttgcctgaatacaaaacactgtagggaacctcttgtgcttgactttgcacacacacgggatcttcagggtgggtacatttaaaactgacaagtattgccaaattgccccccaacgtagtttttacaccccacctactactctcagtgaaaaatcaggccctttttattttaagggctaaattgctaatccctgtgtgaaaatgggtgttaacaaaataaaaaataaggaaaatatgcaggcttacccaattttgttatctatacattttacagtctctaatacttagcatagctcctttgggtgtctgcccaccacccttctttctgaacgtggggttccctgggctttccttgtttgacttcagacctggatctaatagggatctggaggtagaatcaagacgaatgttccctttggccttaggtgagtcctttgcatctctgaggccctgttgatgacatccagttctctagacctctgcccaaaccagagcaatccctcctcaaatatgctaagcagaaatgcagacaatataagacacactatatttatattttaggagtttacattaccttcccttctgtttggaaaccaacatctctcaaaattaggtatagttaacacagaataccccaaaataccaccattcttcataattccatttccttatttctggattctttcaagggtaaaaaccttgtttcattcatctttggggcagcatttgcctagtatgtggtaggcgcccagtagattttggataaactgacctgattttctgttaatattccaactggattatttctttctcctcttacagaatgaagatattcaaatgttattttaaacataccctacagcagaaagttttcatcctgtttttaaccctatggctgctctctttgttaaagcttctaaatgtgagacgactctttccgcaaaaagacatttacttggttgagtactccctaagtacctcgccttttgtaagaaacagatacactcatgttaaggatgaagtcaggtatgaagttaactgttcgggtatctatgaacaggagcctttggaaattggaaagagtctggaaataagaagaagggacatcattgacttggaggatgatgatgttgtggcaatgaccagtgattgtgacatttatcagactctaagaggttatgctcaaaagcttgtctcaaaggaggagaaaagcttcccaatagcctattctttggttgtccacaaagatgcaattatggttgaaaggcttatccatgctatatacaaccagcacaatatttactgcatccattatgatcgtaaggcacctgataccttcaaagttgccatgaacaatttagctaagtgcttctccaatattttcattgcttccaaattagaggctgtggaatatgcccacatttccagactccaggctgatttaaattgcttgtcggaccttctgaagtcttcaatccagtggaaatatgttatcaacttgtgtgggcaagattttcccctgaagtcaaattttgaattggtgtcagagttgaaaaaactcaatggagcaaatatgttggagacggtgaaacccccaaacagtaaattggaaagattcacttaccatcatgaacttagacgggtgccttatgaatatgtgaagctaccaataaggacaaacatctccaaggaagcacccccccataacattcagatatttgttggcagtgcttattttgttttaagtcaagcatttgttaaatatattttcaacaactccatcgttcaagacttttttgcctggtctaaagacacatactctcctgatgagcacttttgggctaccttgattcgggttccaggaatacctggggagatttccagatcagcccaggatgtgtctgatctgcagagtaagactcgccttgtcaagtggaattactatgaaggctttttctatcccagttgtactggatctcaccttcgaagcgtgtgtatttatggagctgcagaattaaggtggcttatcaaagatggacattggtttgctaataaatttgattctaaggtggaccctatcttgattaaatgcttggcagaaaagcttgaagaacagcagagagactggatcactttgccctcagaaaagttatttatggatagaaatctcactaccacatcatgatagtaaaatcaggatggaaataagagggtgcctgataaatggagtcagtgtggaattgaataccatactatgcccaatactgtttaaactcagtcctcccatattttaaaaggtgtccaaaattccatacacaagggaaagtgatctagcctttgatgttattagcctgcagttggctaggtttttttaatatttgtttttgcttgtaatctcactgagccaaatcagagatcttaaacattcagtcagtcatcaaacattattgagcacctaactatatgacaggcacttttttagagactgcggcttatcctcatcatagcaacctcggtatctttaagttctccacataacagtcaggattctactgaagaagcttttgaagtttgtggtaatcgtctgatcatataaaccacccatttcagagtagtgtttaagtactgtgaccaacactccacttgtctcttaactcagctttcaagacattccttaaccatcagagcagaggaggaaagactcactacctcagaaaaatctcaaagaatagtccaatttcctgcttgccaaagcataatctgccttttggtgcattacttggtcaattcagggttgaggagactgttggggggcatttataatgtatgaaagttaaggaagggggtgaggatgtgggttgggacaggtagtacctaaagaggagcgaagggatttatacaacatttttatcatgttacaaaacagtatcatgaatggcctcctttttagttcaactgtttctttaaaatgcatttactgattaaaaataagaactgaccaatagctccaagtgtcacacaccagaacattaagcctaagtcctcaattcataagttatcattctagacaagtttctttacaatggaatactttctatggaatcattataattctgttgtgtggaactatcaagctaagagtcactaaactttcttgaaaaggttgtgtgaaatatgacagctttctaaattaatttgtatagtcatttaaaattttttcttctctggcaactgtccaactggaatccagatttaaggtgataaaagctctaagtttcttgcagtctttttctcagcttagttccagagagaaaaaagctaattttcctaaggacacagcaagaatattcattaaggatattttctaaaacccacacttgagaaaaccacccaatga

SEQ ID NO: 78 - DNA, 1552 bp, Homo sapiens
acttaatgggctcaaggtcacctacctgacctaccagcagctcaatggccttcccaaagaagaaacttcagggtcttgtggctgcaaccatcacgccaatgactgagaatggagaaatcaacttttcagtaattggtcagtatgtggattatcttgtgaaagaacagggagtgaagaacatttttgtgaatggcacaacaggagaaggcctgtccctgagcgtctcagagcgtcgccaggttgcagaggagtgggtgacaaaagggaaggacaagctggatcaggtgataattcacgtaggagcactgagcttgaaggagtcacaggaactggcccaacatgcagcagaaataggagctgatggcatcgctgtcattgcaccgttcttcctcaagccatggaccaaagatatcctgattaatttcctaaaggaagtggctgctgccgcccctgccctgccattttattactatcacattcctgccttgacaggggtaaagattcgtgctgaggagttgttggatgggattctggataagatccccaccttccaagggctgaaattcagtgatacagatctcttagacttcgggcaatgtgttgatcagaatcgccagcaacagtttgctttcctttttggggtggatgagcaactgttgagtgctctggtgatgggagcaactggagcagtgggcagtacctataactacctgggaaaaaagacaaaccagatgttggaggcttttgaacaaaaggacttctctttagccctgaactatcagttttgtatccagagatttatcaactttgttgtcaaactaggttttggagtgtcacagaccaaagccatcatgactctggtctctgggattccaatgggcccaccccggcttccactgcagaaagcctccagggagtttactgatagtgctgaagctaaactgaagagcctggatttcctttctttcactgatttaaaggatggaaacttggaagctggtagctagtgcctctctatcaaatcagggtttgcaccttgagacataatctaccttaaatagtgcatttttttctcagggaattttagatgaacttgaataaactctcctagcaaatgaaatctcacaataagcattgaggtaccttttgtgagccttaaaaagtcttattttgtgaaggggcaaaaactctaggagtcacaactctcagtcattcatttcacagatttttttgtggagaaatttctgtttatatggatgaaatggaatcaagaggaaaattgtaattgattaattccatctgtctttaggagctctcattatctcggtctctggttcctaatcctattttaaagttgtctaattttaaaccactataatatgtcttcattttaataaatattcatttggaatctaggaaaactctgagctactgcatttaggcaggcactttaataccaaactgtaacatgtctcaactgtatacaactcaaaatacaccagctcatttggctgctcagtctaactctagaatggatgcttttgaattcatt

SEQ ID NO: 79 - DNA, 1535 bp, Homo sapiens
gggcgtttacaggcaggcaggtcagtgatgtgtcctaagggtccgaccgacctagatacccctctttgattcctcctcttgggattagtgtccatctctggaagcaggatccaggaggacgggaggggccgctgcggaccgcagtcgctccacctggaggagacaccagaaggaagacagcctgagggacgcagccatccccggctcctaccggcgccccgccccgcgcatgcgcacgcgcacagggagtcagctggctgcgcgggaggtcacgggaagtggggcggtgcccagacagctggagggaaggaggtgtcaggcggggagagacgcaaacggcgggaccagcagcgacggtagcagcagcatggccgcgatctatgggggtgtagaggggggaggcacacgatccgaggtccttttagtctcagaggatgggaagatcctggcagaagcagatggactgagcacaaaccactggctgatcgggacagacaagtgtgtggagaggatcaatgagatggtgaacagggccaaacggaaagcaggggtggatcctctggtaccgctgcgaagcttgggcctatctctgagcggtggggaccaggaggacgcggggaggatcctgatcgaggagctgagggaccgatttccctacctgagtgaaagctacttaatcaccaccgatgccgccggctccatcgccacagctacaccggatggtggagttgtgctcatatctggaacaggctccaactgcaggctcatcaaccctgatggctccgagagtggctgcggcggctggggccatatgatgggtgatgagggttcagcctactggatcgcacaccaagcagtgaaaatagtgtttgactccattgacaacctagaggcggctcctcatgatatcggctacgtcaaacaggccatgttccactatttccaggtgccagatcggctagggatactcactcacctgtatagggactttgataaatgcaggtttgctgggttttgccggaaaattgcagaaggtgctcagcagggagaccccctttcccgctatatcttcaggaaggctggggagatgctgggcagacacatcgtagcagtgttgcccgagattgacccggtcttgttccagggcaagattggactccccatcctgtgcgtgggctctgtgtggaagagctgggagctgctgaaggaaggttttcttctggcgctgacccagggcagagagatccaggctcagaacttcttctccagcttcaccctgatgaagctgaggcactcctccgctctgggtggggccagcctaggggccaggcacatcgggcacctcctccccatggactatagcgccaatgccattgccttctattcctacaccttttcctagggggctggtcccggctccaccccctccaagctcagtggacactgggtctgaaaggaaggagtcttttgcttcctttctcctttttacaaaaacaaacatagaagaaaataaatgcactttatccactccccaa

SEQ ID NO: 80 - DNA, 2013 bp, Homo sapiens
ctccgctgcgtgtaggtgaagggggcttcctgaccgagacatggatttaggtgctattacaaaatactcagcattacacgccaagcccaatggactgatccttcaatacgggactgctggatttcgaacgaaggcagaacatcttgatcatgtcatgtttcgcatgggattattagctgtcctgaggtcaaaacagacaaaatccactataggagtcatggtaacagcgtcccacaatcctgaggaagacaatggtgtaaaattggttgatcctttgggtgaaatgttggcaccatcctgggaggaacatgccacctgtttagcaaatgctgaggaacaagatatgcagagagtgcttattgacatcagcgagaaagaagctgtgaatctgcaacaagatgcctttgtagttattggtagagataccaggcccagcagtgagaaactttcacaatctgtaatagatggtgtgactgttctaggaggtcaattccatgattatggcttgttaacaacaccccagctgcactacatggtgtattgtcgaaacacgggtggccgatatggaaaggcaactatagaaggttactaccagaaactctctaaggcttttgtggaactcaccaaacaggcttcttgcagtggagatgaatacagatcacttaaggttgactgtgcaaatggcataggggccctgaagctaagggaaatggaacactacttctcacagggcctgtcagttcagctgtttaatgatgggtccaagggcaaactcaatcatttatgtggagctgactttgtgaaaagtcatcagaaacctccacagggaatggaaattaagtccaatgaaagatgctgttcttttgatggagatgcagacagaattgtttattactaccatgatgcagatggccactttcatctcatagatggagacaagatagcaacgttaattagcagtttccttaaagagctcctggtggagattggagaaagtttgaatattggtgttgtacaaactgcatatgcaaatggaagttcaacacggtatcttgaagaagttatgaaggtacctgtctattgcactaagactggtgtaaaacatttgcaccacaaggctcaagagtttgacattggagtttattttgaagcaaatgggcatggcactgcactgtttagtacagctgttgaaatgaagataaaacaatcagcagaacaactggaagataagaaaagaaaagctgctaagatgcttgaaaacattattgacttgtttaaccaggcagctggtgatgctatttctgacatgctggtgattgaagcaatcttggctctgaagggcttgactgtacaacagtgggatgctctctatacagatcttccaaacagacaacttaaagttcaggttgcagacaggagagttattagcactaccgatgctgaaagacaagcagttacacccccaggattacaggaggcaatcaatgacctggtgaagaagtacaagctttctcgagcttttgtccggccctctggtacagaagatgtcgtccgagtatatgcagaagcagactcacaagaaagtgcagatcaccttgcacatgaagtgagcttggcagtatttcagctggctggaggaattggagaaaggccccaaccaggtttctgaagataattttcatattcctgagaaactggactttttacaagtctttacaaaactgtcaataataatggcagtactaagagatttataatcataatgtttacaatgcagcctactggattgtctctagatctgtttttcttaaacactaacagaataattctttataaataggtaagccttacacttgttaaagaaatttacctctaatttcagtctcactaatgtaaaatactgggacttaagtatacaattcagtcactaactgtacagttttatgtggggaacaattcatgcaggctactggaaaattaaatcttattaccaaaaaaaaaaaaaaaaaaaaa

SEQ ID NO: 81 - DNA, 1472 bp, Homo sapiens
gtggagggtcgcggcaggaacaagtgcgggggcggggcctcaaagccccgcccccaggcccagcggaaccctgaagaggagggggagggtgagccgggcgcggctgtgtcagctgagtgacagtcacgggaccgcgaccaactctgtctggcttcctagaggagcaggagggcggggcaagggtctcccagcgcgacaggacatggagaaagagcgagagactctgcaggcctggaaggagcgcgtggggcaggagctggaccgcgtggtggctttctggatggagcactcccacgaccaggagcacgggggcttcttcacgtgccttggccgcgaggggcgggtgtatgatgacctcaagtatgtgtggctgcaggggaggcaggtatggatgtattgtcgcctgtaccgcactttcgagcgcttccgccatgctcagcttctggacgcagcaaaagcaggtggtgagttcttgctgcggtatgcccgggtggcacctcctggcaagaagtgtgcctttgtgctgactcgggacggccgcccggtcaaggtgcagcgaaccatcttcagtgagtgtttctacaccatggccatgaacgagctgtggagagccacaggggaagtgcggtaccagacggaagcggtggagatgatggatcagatcgtccactgggtgcaggaggacgcgtcgggactgggccggccccagctccagggggccccggctgcggagcccatggcggtgcccatgatgctactgaacctggtggagcagctcggggaggcagatgaggagctggcgggcaaatacgcagagctgggggactggtgcgcccggaggattctgcagcacgtgcagagggatggacaagctgtgctggagaatgtgtcagagggtggcaaggaacttcctggctgcctggggagacagcagaacccaggccacacgctggaagccggctggtttctgctccgtcattgcattcggaaaggcgaccccgaacttcgagcccacgtgattgacaagttcctattgttgcccttccactccggatgggaccctgaccacggaggcctcttttacttccaggatgctgataacttctgccccacccagctggagtgggccatgaagctctggtggccacacagtgaagccatgattgccttcctcatgggttacagtgacagtggggaccctgtgctgctgcgcctcttctaccaagtggctgagtacaccttccgccagtttcgcgatcccgagtacggggaatggtttggctacctgagccgagagggcaaggtggccctctccatcaagggaggtcctttcaaaggctgcttccacgtgccgcggtgcctagccatgtgcgaggagatgctgggcgccctgctgagccgccccgcccccgccccctcccccgcccccacccccgcctgccgaggcgcggaataaaggctgagtccgctcc

SEQ ID NO: 82 - DNA, 2753 bp, Homo sapiens
gggccaggccggggcggggccgcaagcggcatggaggaggcggaggccgcggcgagccgggccgagcagtgagggccctagcggggcccgagcggggcccggggcccctaagccattcctgaagtcatgggctggccaggacattggtgacccgccaatccggtatggacgactggaagcccagccccctcatcaagccctttggggctcggaagaagcggagctggtaccttacctggaagtataaactgacaaaccagcgggccctgcggagattctgtcagacaggggccgtgcttttcctgctggtgactgtcattgtcaatatcaagttgatcctggacactcggcgagccatcagtgaagccaatgaagacccagagccagagcaagactatgatgaggccctaggccgcctggagcccccacggcgcagaggcagtggtccccggcgggtcctggacgtagaggtgtattcaagtcgcagcaaagtatatgtggcagtggatggcaccacggtgctggaggatgaggcccgggagcagggccggggcatccatgtcattgtcctcaaccaggccacgggccacgtgatggcaaaacgtgtgtttgacacgtactcacctcatgaggatgaggccatggtgctattcctcaacatggtagcgcccggccgagtgctcatctgcactgtcaaggatgagggctccttccacctcaaggacacagccaaggctctgctgaggagcctgggcagccaggctggccctgccctgggctggagggacacatgggccttcgtgggacgaaaaggaggtcctgtcttcggggagaaacattctaaatcacctgccctctcttcctggggggacccagtcctgctgaagacagatgtgccattgagctcagcagaagaggcagagtgccactgggcagacacagagctgaaccgtcgccgccggcgcttctgcagcaaagttgagggctatggaagtgtatgcagctgcaaggaccccacacccatcgagttcagccctgacccactcccagacaacaaggtcctcaatgtgcctgtggctgtcattgcagggaaccgacccaattacctgtacaggatgctgcgctctctgctttcagcccagggggtgtctcctcagatgataacagttttcattgacggctactatgaggaacccatggatgtggtggcactgtttggtctgaggggcatccagcatactcccatcagcatcaagaatgcccgcgtgtctcagcactacaaggccagcctcactgccactttcaacctgtttccggaggccaagtttgctgtggttctggaagaggacctggacattgctgtggattttttcagtttcctgagccaatccatccacctactggaggaggatgacagcctgtactgcatctctgcctggaatgaccaggggtatgaacacacggctgaggacccagcactactgtaccgtgtggagaccatgcctgggctgggctgggtgctcaggaggtccttgtacaaggaggagcttgagcccaagtggcctacaccggaaaagctctgggattgggacatgtggatgcggatgcctgaacaacgccggggccgagagtgcatcatccctgacgtttcccgatcctaccactttggcatcgtcggcctcaacatgaatggctactttcacgaggcctacttcaagaagcacaagttcaacacggttccaggtgtccagctcaggaatgtggacagtctgaagaaagaagcttatgaagtggaagttcacaggctgctcagtgaggctgaggttctggaccacagcaagaacccttgtgaagactctttcctgccagacacagagggccacacctacgtggcctttattcgaatggagaaagatgatgacttcaccacctggacccagcttgccaagtgcctccatatctgggacctggatgtgcgtggcaaccatcggggcctgtggagattgtttcggaagaagaaccacttcctgatggtgggggtcccggcttccccctactcagtgaagaagccaccctcagtcaccccaattttcctggagccacccccaaaggaggagggagccccaggagccccagaacagacatgagacctcctccaggaccctgcggggctgggtactgtgtacccccaggctggctagcccttccctccatcctgtaggattttgtagatgctggtaggggctggggctaccttgtttttaacatgagacttaattactaactccaaggggagggttcccctgctccaacaccccgttcctgagttaaaagtctatttatttacttccttgttggagaagggcaggagagtacctgggaatcattacgatccctagcagctcatcctgccctttgaataccctcactttccaggcctggctcagaatctaacctatttattgactgtcctgagggccttgaaaacaggccgaacctggagggcctggatttctttttgggctggaatgctgccctgagggtggggctggctcttactcaggaaactgctgtgcccaacccatggacaggcccagctggggcccacatgctgacacagactcactcagagacccttagacactggaccaggcctcctctcagccttctctttgtccagatttccaaagctggataagttggtcattgattaaaaaaggagaagccctctggggaaaaaaaaaaaaaaaaaa

SEQ ID NO: 83 - DNA, 2519 bp, Homo sapiens
gctgttctcctagcagcgcgggccggtcggaccgccaaggcagccggcgctggcgatgggaagcggcgtggccgccgacacaggcagtggcaaagtttcccagacgtacacatctggacgcgcggctgccggctacccgtgacccctctaggaagggttcagggatttttaatttggaaaaaaatccacctggtttcctttgtcaaggtctctccgggtggccagcggcaggagctgcaaacttgggcacggcggctacaccggcagcggaccgggctttggagaacctcgggactcaggtgctgaggtgcccagcggctccggacgtgctacggggtgcgagcgcgggggagttcggggcgcacgacaaggaagggcccccgggagctctatatggaggaaggagcccagaatggtgtgcaccaggaagaccaaaactttggtgtccacttgcgtgatcctgagcggcatgactaacatcatctgcctgctctacgtgggctgggtcaccaactacatcgccagcgtgtatgtgcgggggcaggagccggcgcccgacaagaagctggaggaagacaaaggggacactctgaagattattgagcggctggaccacctggagaatgtcatcaagcagcacattcaagaggctcctgccaagcctgaggaggcagaggccgagcccttcacagactcctctctgtttgcacactggggccaggagctcagccccgaaggccggcgcgtggccctgaagcaattccagtactacggctacaacgcctacctcagcgaccgcctgcccctgggccggcccctgcctgacctcagacccagtgggtgccgtaacctctcatttcctgacagcctgccagaggtgagcatcgtgttcatcttcgtcaatgaagcgctttcagtgctgctgcgctccatccactcggccatggaacgcacgcccccacatctgctcaaggagatcattctggtggatgacaacagcagtaacgaggaactgaaggagaagctgaccgaatatgtggacaaggtgaacagccagaagccaggcttcatcaaagtcgtgcgtcacagcaagcaggaaggcctcatccgctccagggtcagtggctggagggcggccactgcccctgtggtggcactctttgatgcccacgtggagttcaatgtgggctgggctgaacctgtactcacccgcatcaaggagaaccggaagcggatcatctcgccatcctttgataacatcaaatatgacaactttgagatagaagagtacccgctggctgcccagggctttgactgggagctgtggtgccgctacctaaatccccccaaggcctggtggaagctggagaactccacagcgccaatcaggagccctgccctcattggctgcttcattgtggaccggcagtacttccaggagatcggcctgctggacgaaggcatggaagtctacgggggcgagaatgtggagcttgggatcagggtgtggcagtgtggcgggagtgtggaggtcctgccctgctcacggattgcccacattgagcgagcccacaagccctacacagaggacctcaccgcccatgtccgcaggaacgctctcagggtggctgaagtctggatggatgaatttaaaagccacgtctacatggcatggaacataccgcaggaggactcaggaattgacattggggacatcactgcaaggaaggctctcaggaaacagctgcagtgcaagaccttccggtggtacctggtcagcgtgtacccagagatgaggatgtactccgacatcattgcctatggagtgctgcagaattctctgaagactgatttgtgtcttgaccaggggccagatacagagaatgtccccatcatgtacatctgccatgggatgacgcctcagaacgtgtactacacgagcagtcagcagatccatgtgggcattctgagccccaccgtggatgatgatgacaaccgatgcctggtggacgtcaacagccggccccggctcaccgaatgcagctacgccaaagccaagaggatgaagcttcactggcagttctctcagggaggacccatccagaaccgcaagtctaagcgctgtctggagctgcaggagaatagcgacctggagttcggcttccagctggtgttgcagaagtgctcgggccagcactggagcatcaccaacgtcctgaggagcctcgcgtcctgacccaccggggccacttccggctgcctctttgctactgtgtagcacctgctgcaacgttgcctgctgtccacgtggggttgtttggagtctggggaaccaggttagtgggcccccaagaagagctttttatttcctattcaattttcatggagtttatagaaagatgctgattggtaggtgatggtatgatatcaaactattttgcagttgtaaataggggacagatggaaaatatttataactgacaataaaatattattaagaaaagaaaaaaaaaaaaaaa

SEQ ID NO: 84 - DNA, 5536 bp, Homo sapiens
gcgcggggcgggagcttggtggagcaggagcggctgggcatcctcctgagactccggggtcagacgcccactccagcgctttctgcgcagcacaggcaccctcgcctgtcacgcctccctctcctcttcccgtctcccagcgtggatgagggcgcctgcagatcccggctagggcacggaccgcctaggccgagatttctttaaagcctcgtgcagcacatcattatcgctggatgcccggacatgtaatacacctgacagcatgtgaagtgctcagaatggggcaggatgtcacctggaatcagcactaagtgattcagactttccttacttttaaatgtgctgctcttcatttcaagatgccgttgcagctctgataaatgcaaactgacaaccttcaaggccacgacggagggaaaatcattggtgcttggagcatagaagactgcccttcacaaaggaaatccctgattattgtttgaaatgctgaggacgttgctgcgaaggagacttttttcttatcccaccaaatactactttatggttcttgttttatccctaatcaccttctccgttttaaggattcatcaaaagcctgaatttgtaagtgtcagacacttggagcttgctggggagaatcctagtagtgatattaattgcaccaaagttttacagggtgatgtaaatgaaatccaaaaggtaaagcttgagatcctaacagtgaaatttaaaaagcgccctcggtggacacctgacgactatataaacatgaccagtgactgttcttctttcatcaagagacgcaaatatattgtagaaccccttagtaaagaagaggcggagtttccaatagcatattctatagtggttcatcacaagattgaaatgcttgacaggctgctgagggccatctatatgcctcagaatttctattgcattcatgtggacacaaaatccgaggattcctatttagctgcagtgatgggcatcgcttcctgttttagtaatgtctttgtggccagccgattggagagtgtggtttatgcatcgtggagccgggttcaggctgacctcaactgcatgaaggatctctatgcaatgagtgcaaactggaagtacttgataaatctttgtggtatggattttcccattaaaaccaacctagaaattgtcaggaagctcaagttgttaatgggagaaaacaacctggaaacggagaggatgccatcccataaagaagaaaggtggaagaagcggtatgaggtcgttaatggaaagctgacaaacacagggactgtcaaaatgcttcctccactcgaaacacctctcttttctggcagtgcctacttcgtggtcagtagggagtatgtggggtatgtactacagaatgaaaaaatccaaaagttgatggagtgggcacaagacacatacagccctgatgagtatctctgggccaccatccaaaggattcctgaagtcccgggctcactccctgccagccataagtatgatctgtctgacatgcaagcagttgccaggtttgtcaagtggcagtactttgagggtgatgtttccaagggtgctccctacccgccctgcgatggagtccatgtgcgctcagtgtgcattttcggagctggtgacttgaactggatgctgcgcaaacaccacttgtttgccaataagtttgacgtggatgttgacctctttgccatccagtgtttggatgagcatttgagacacaaagctttggagacattaaaacactgaccattacgggcaattttatgaacaagaagaaggatacacaaaacgtacccttatctgtttccccttccttgtcagcatcgggaagatggtatgaagtcctctttggggcagggactctagtagatcttcttgtcagagaagctgcatggtttctgcagagcacagttagctagaaaggtgatagcattaaatgttcatctagagttaatagtgggaggagtaaaggtagccttgaggccagagcaggtagcaaggcattgtggaaagaggggaccagggtggctggggaagaggccgatgcataaagtcagcctgttcaaagtgctcagggacttagcaaaatgagaagatgtgacctgtgccaaaactattttgagaattttaaatgtgaccatttttctggtatgaataaacttacagcaacaaataatcaaagatacaattaatctgatattatatttgttgaaatagaaatttgattgtactataaatgatttttgtaaataatttatattctgctctaatactgtactgtgtagtgtgtctccgtatgtcatctcagggagcttaaaatgggcttgatttaacattgaaaaaaaattttttgtgttatttttgcttgaaacaacgcacacattttcaacaaccaaaaaatgacaatttctagtttagttaatttctacaaatcatcttatgttattagcaaggttaagacatcttttttaaaaaaattatagcttctaccaagagaaacactcaatttttctagagatttgcctctatcttcctttcctcagtcttcccagactgctatcaagctgtgtaaaaatttactttcactggaccctaaattattgtctctgctatctgactgccagtaattagtgcagaaaactaagacaggatgatacaggtttgaggggctggggagtgggaggggggagaaaaggaatgtatttaaacaatttccgatgcccatgatgagtttaaaaaccagcattgacaccatccccaaaattaaggctgtcgcttattgaatccacttgtgtccaacctcccaggattgttttatcctaatgtcacctgtatattcatttgaaaggacttggccctgttcttgggtcttcccgttacctgccccctgggtggtaagtttcctcctttctcaaccttccacgaggaggaaagaagtgtgcagtcattccacatggcctgttggaaggcctggggagggaactttgggtttgggacagatttttttttttgtttttggtatcattcacagcatacgatttttactctctccatcttcaccataagacagataatttggggttgctataatgctgtcacacatctcaaagtacattcaaatcttaaaaagaaattctcgtacttttgccatgttgatactgttcagcaaacaagctaccaggaactgtgaggctttgtcatttagcattagactttaaacaagaattaaaatcatgtgctgtatttttaaaatctagccaaattaaatagtacatgagaaattcagagtattagacagttttaaggcattcaactgagaaaactttatttgtcaaagtcagaaaacattttcatcttattgagagatatgtttttaaacttttatcatcatttgtaaatgtggaagttggtggattgctgtgtttttgcatgattagcatgggagtctgttggagcaagaggaacatgcttgttttgaaaactcgagatgatgagggtggtacatgcagtgtgttctctctttattggcttctaaaccagttttgtcctttaatgcatgtcaaatatttctcccatgcttctcttagcagaaaagtttttacctataagacagggcaccttttaactctaaaactagtgatactcagtgacatagactttgtcttataaacattttttcattttttattttgaaaaattgcaaatctacagcaaaagtaaaacagtagagtgaacaccatgtaaccctcacctggtgttaacattgtaccctatttgctttaagttgtatgtatttctgaacttggcaaaattggaaattaaaatttttaaaaattacaaatatacaaagttatttatcttagcacatttattatgtgtgactgcatctgatttatatttaaattggcaggttttgagggatttttttcttcatcataaatgtaaacataggattttagagtctatttccccaagcgccacattataactgtaaacttaccatcttctatgtagctgtgatatctcatctttctaaaatggaacttgttaaaaagtgttcaaacactatccctaatgcctgcggcagaatttatatacgatccattcattggggctcaaagtatcttttagacttttaaggacaatttacagcaaatgaaatttatgatgctgtgacaagaaatttaaagaatcaaaacgatggtttgaaaaggaaacctatgatacatgcaggagaagcaaaacccaagtgatttgtgagaaatatagaaattatttaaattactttatagtaattattaaacactaatttttgtactgtcattgaaggtgttttatagagaaatctgagaaatcacattcacaaattagaagtcaaacatggccaggcacagtggctcacacctgtaatcttcaggatttcaagaccagcctagccaacatgacgaaaccccatctctactgaaaatagaaaaaaaaattagccaggcttgcacctgtaatcccagttacctgggaggctgaggcaggagaatctcttgagcccaggaggcggaggttgcagtgagctgagatgccaccaccacaccagcctgggtgacagagtgaaactcgtatctccaaacaaacaaacaaaaagtccttaaacatatgtgaacaaaaattttgtgatggaaggattctagttaatgagtattgcatcaagatttacatctttcttactaaggaaaagagttaataaaaattgttctttattttacaggcagttactgaggctcttcccagatctcagtaaacagccactcagccttgaaaatggagtgttgttgtttctaaacatatatttatgtcatttattaagtacagttcacttaaataacataagtagattttctcttgtagtgatttgggtaggaagaggccatgtttcagttcgttttctctgtagggtcgattgaattggaccttttcagttgttcagaaaaataaaaataatttctcatattaaatacagacgctcctcaacttatgatgtgggtaggtcccagtaaacccattataatttgaaaatatcatattgaaaatgcatttaatatctcttacctgaaatcataacttagccaagcctaccttaaatgttctcagaacatttagcctgcagttgggcaaaaccatttaacacaaagcctattttataatgaagtgttgaatagctcatgttatttactgaatactgttgtgaaagtgaaaaacaatgattgtatgggtactcaaagtataatttctactgaatgcatatcacttgtgcactgttgtaaagctgaaaaaccgttaagcctctacgatttttaagtaagttggggaccatcagtttaaaataaatgcaatactatttcatgataaacatggtcactgtaagttttactcttttgaatgagggtgcgacagaatgcagttagaatcagttcatatcaccattaaaatcatccattcagaaaccaaaaaaaaaaaa

SEQ ID NO: 85 - DNA, 2128 bp, Homo sapiens
cttgagaatgtttctgcatgatttctctgggcttgctgtcttacctgagagcaggaagtcaaaaggagagtgatggagccacctgctgccctctactttgcagatattaaagaggagcctgaaactgttccttggacatcttatgaatgtcagaaaataccttttggagggttagaagatcaggggacatggttgttcacatttgctgccacggaacaccgccagtcttcacttggaaacagaatcacgccttgtgaagagatcatccctaagcaggagagaagctactaaaggattgtgtcctcctccaccttccctgtgctcggtctccacctgtctcccattctgtgacgatggttcaatggaagagactctgccagctgcattacttgtgggctctgggctgctatatgctgctggccactgtggctctgaaactttctttcaggttgaagtgtgactctgaccacttgggtctggagtccagggaatctcaaagccagtactgtaggaatatcttgtataatttcctgaaacttccagcaaagaggtctatcaactgttcaggggtcacccgaggggaccaagaggcagtgcttcaggctattctgaataacctggaggtcaagaagaagcgagagcctttcacagacacccactacctctccctcaccagagactgtgagcacttcaaggctgaaaggaagttcatacagttcccactgagcaaagaagaggtggagttccctattgcatactctatggtgattcatgagaagattgaaaactttgaaaggctactgcgagctgtgtatgcccctcagaacatatactgtgtccatgtggatgagaagtccccagaaactttcaaagaggcggtcaaagcaattatttcttgcttcccaaatgtcttcatagccagtaagctggttcgggtggtttatgcctcctggtccagggtgcaagctgacctcaactgcatggaagacttgctccagagctcagtgccgtggaaatacttcctgaatacatgtgggacggactttcctataaagagcaatgcagagatggtccaggctctcaagatgttgaatgggaggaatagcatggagtcagaggtacctcctaagcacaaagaaacccgctggaaatatcactttgaggtagtgagagacacattacacctaaccaacaagaagaaggatcctcccccttataatttaactatgtttacagggaatgcgtacattgtggcttcccgagatttcgtccaacatgttttgaagaaccctaaatcccaacaactgattgaatgggtaaaagacacttatagcccagatgaacacctctgggccacccttcagcgtgcacggtggatgcctggctctgttcccaaccaccccaagtacgacatctcagacatgacttctattgccaggctggtcaagtggcagggtcatgagggagacatcgataagggtgctccttatgctccctgctctggaatccaccagcgggctatctgcgtttatggggctggggacttgaattggatgcttcaaaaccatcacctgttggccaacaagtttgacccaaaggtagatgataatgctcttcagtgcttagaagaatacctacgttataaggccatctatgggactgaactttgagacacactatgagagcgttgctacctgtggggcaagagcatgtacaaacatgctcagaacttgctgggacagtgtgggtgggagaccagggctttgcaattcgtggcatcctttaggataagagggctgctattagattgtgggtaagtagatcttttgccttgcaaattgctgcctgggtgaatgctgcttgttctctcacccctaaccctagtagttcctccactaactttctcactaagtgagaatgagaactgctgtgatagggagagtgaaggagggatatgtggtagagcacttgatttcagttgaatgcctgctggtagcttttccattctgtggagctgccgttcctaataattccaggtttggtaacgtggaggagaactttgatggaaagagaacttccttctgtactgttaacttaaaaataaatactcctgatcaaaaaaaaaaaa

SEQ ID NO: 86 - DNA, 2588 bp, Homo sapiens
aggcgcgagggctggctgctgggccgacgaggggcggtgccaggccgtgggtccttagtcaagtgacgcgaagcggccggcctgggcgccgactgcagagccgggaggctggtggtcatgccggggttcctggttcgcatcctccctctgttgctggttctgctgcttctgggccctacgcgcggcttgcgcaatgccacccagaggatgtttgaaattgactatagccgggactccttcctcaaggatggccagccatttcgctacatctcaggaagcattcactactcccgtgtgccccgcttctactggaaggaccggctgctgaagatgaagatggctgggctgaacgccatccagacgtatgtgccctggaactttcatgagccctggccaggacagtaccagttttctgaggaccatgatgtggaatattttcttcggctggctcatgagctgggactgctggttatcctgaggcccgggccctacatctgtgcagagtgggaaatgggaggattacctgcttggctgctagagaaagagtctattcttctccgctcctccgacccagattacctggcagctgtggacaagtggttgggagtccttctgcccaagatgaagcctctcctctatcagaatggagggccagttataacagtgcaggttgaaaatgaatatggcagctactttgcctgtgattttgactacctgcgcttcctgcagaagcgctttcgccaccatctgggggatgatgtggttctgtttaccactgatggagcacataaaacattcctgaaatgtggggccctgcagggcctctacaccacggtggactttggaacaggcagcaacatcacagatgctttcctaagccagaggaagtgtgagcccaaaggacccttgatcaattctgaattctatactggctggctagatcactggggccaacctcactccacaatcaagaccgaagcagtggcttcctccctctatgatatacttgcccgtggggcgagtgtgaacttgtacatgtttataggtgggaccaattttgcctattggaatggggccaactcaccctatgcagcacagcccaccagctacgactatgatgccccactgagtgaggctggggacctcactgagaagtattttgctctgcgaaacatcatccagaagtttgaaaaagtaccagaaggtcctatccctccatctacaccaaagtttgcatatggaaaggtcactttggaaaagttaaagacagtgggagcagctctggacattctgtgtccctctgggcccatcaaaagcctttatcccttgacatttatccaggtgaaacagcattatgggtttgtgctgtaccggacaacacttcctcaagattgcagcaacccagcacctctctcttcacccctcaatggagtccacgatcgagcatatgttgctgtggatgggatcccccagggagtccttgagcgaaacaatgtgatcactctgaacataacagggaaagctggagccactctggaccttctggtagagaacatgggacgtgtgaactatggtgcatatatcaacgattttaagggtttggtttctaacctgactctcagttccaatatcctcacggactggacgatctttccactggacactgaggatgcagtgcgcagccacctggggggctggggacaccgtgacagtggccaccatgatgaagcctgggcccacaactcatccaactacacgctcccggccttttatatggggaacttctccattcccagtgggatcccagacttgccccaggacacctttatccagtttcctggatggaccaagggccaggtctggattaatggctttaaccttggccgctattggccagcccggggccctcagttgaccttgtttgtgccccagcacatcctgatgacctcggccccaaacaccatcaccgtgctggaactggagtgggcaccctgcagcagtgatgatccagaactatgtgctgtgacgttcgtggacaggccagttattggctcatctgtgacctacgatcatccctccaaacctgttgaaaaaagactcatgcccccacccccgcaaaaaaacaaagattcatggctggaccatgtatgatgatgaaagcctgtgtctttgagggattctaccctgaacatacctcacagatcctccctgtcatgccacatttcactgattggaatgtggaaatggaaaaggaatttaggatgtgcattttcacctgaggtttccctgcatccctgcagtgccaaagccccaccttcagggaccacctggaatgtgtgaggggctgacagcacagtaacgtgcatacatatctgcagggctggaatggaagctttaaaggtggtagtgatttttattttggaagaatcatgttacctttttgttaaataaaatttgtactcaaatgatgatgtcactgtttttaatgtgcaggtattgaattatatggtctgacttaaatcataactagacttgagtgggctgaataaaccacttcactaacttgaagttcaaaaggatggaaaata

SEQ ID NO: 87 - DNA, 3760 bp, Homo sapiens
gctctgcctgcttcgtggcgcttggttcgtccctcgcccgaggagcgcggtggcggcgtgggagggagcctctgacggcgtctggaactctattttaagaacctctcaaaacgaaacaagcaaatcatggagaagaatggaaataaccgaaagctgcgggtttgtgttgctacttgtaaccgtgcagattattctaaacttgccccgatcatgtttggcattaaaaccgaacctgagttctttgaacttgatgttgtggtacttggctctcacctgatagatgactatggaaatacatatcgaatgattgaacaagatgactttgacattaacaccaggctacacacaattgtgaggggagaagatgaggcagccatggtggagtcagtaggcctggccctagtgaagctgccagatgtccttaatcgcctgaagcctgatatcatgattgttcatggagacaggtttgatgccctggctctggccacatctgctgccttgatgaacatccgaatccttcacattgaaggtggggaagtcagtgggaccattgatgactctatcagacatgccataacaaaactggctcattatcatgtgtgctgcacccgcagtgcagagcagcacctgatatccatgtgtgaggaccatgatcgcatccttttggcaggctgcccttcctatgacaaacttctctcagccaagaacaaagactacatgagcatcattcgcatgtggctaggtgatgatgtaaaatctaaagattacattgttgcactacagcaccctgtgaccactgacattaagcattccataaaaatgtttgaattaacattggatgcacttatctcatttaacaagcggaccctagtcctgtttccaaatattgacgcagggagcaaagagatggttcgagtgatgcggaagaagggcattgagcatcatcccaactttcgtgcagttaaacacgtcccatttgaccagtttatacagttggttgcccatgctggctgtatgattgggaacagcagctgtggggttcgagaagttggagcttttggaacacctgtgatcaacctgggaacacgtcagattggaagagaaacaggggagaatgttcttcatgtccgggatgctgacacccaagacaaaatattgcaagcactgcaccttcagtttggtaaacagtacccttgttcaaagatatatggggatggaaatgctgttccaaggattttgaagtttctcaaatctatcgatcttcaagagccactgcaaaagaaattctgctttcctcctgtgaaggagaatatctctcaagatattgaccatattcttgaaactctaagtgccttggccgttgatcttggcgggacgaacctccgagttgcaatagtcagcatgaagggtgaaatagttaagaagtatactcagttcaatcctaaaacctatgaagagaggattaatttaatcctacagatgtgtgtggaagctgcagcagaagctgtaaaactgaactgcagaattttgggagtaggcatttccacaggtggccgtgtaaatcctcgggaaggaattgtgctgcattcaaccaaactgatccaagagtggaactctgtggaccttaggacccccctttctgacactttgcatctccctgtgtgggtagacaatgatggcaactgtgctgccctggcggaaaggaaatttggccaaggaaagggactggaaaactttgttacacttatcacaggcacaggaatcggtggtggaattatccatcagcatgaattgatccacggaagctccttctgtgctgcagaactgggccaccttgttgtgtctctggatgggcctgattgttcctgtggaagccatgggtgcattgaagcatacgcctctggaatggccttgcagagggaggcaaaaaagctccatgatgaggacctgctcttggtggaagggatgtcagtgccaaaagatgaggctgtgggtgcgctccatctcatccaagctgcgaaacttggcaatgcgaaggcccagagcatcctaagaacagctggaacagctttgggtcttggggttgtgaacatcctccataccatgaatccctcccttgtgatcctctccggagtcctggccagtcactatatccacattgtcaaagacgtcattcgccagcaggccttgtcctccgtgcaggacgtggatgtggtggtttcggatttggttgaccccgccctgctgggtgctgccagcatggttctggactacacaacacgcaggatctactagacctccaggaacagacatggaccttctctccagagctcctgagtggaatcaagttcttgtctttaggatgaccgtttcttaacaatcaaatctggtattgaactgcaggtgactttggcagagaaatgttttcacttttggtctcctcttccagagtcacctttccccactcctatttttgtagatgctattctttctgatgtcttcttactaggggtcattttagctcaaaccctgtaagttacagtcacaattttctgtgccaaagcagctacaataatagagaggaagccttcttagaactctgcttactaatgtattaataccactgagaccttcaggccttcgctgggatatcacttcatcctgaagtttgcattaataatccttccaggccgggcacagtggctcacgcctgtaatcccagcactttgggaggccgaggcgggcggatcacgaggtcaggagatcgagaccgccctggctaacatggtgaaacatggtgaaaccccgtctctactaaaaatacaaaaaattagctgggtgtggtggcgggtcccagctactcgggaggctgaggcaggagaatggcatgaaccccaggctggagtgcagtggctcaatgcaacctctgccccccaagttcaagtgattctcctgcctcagcctcttgagtagctgggattacaggcacatgcaccacgcccggctgatttttttttgtatttttagtagacagggtttcaccatgttggccaggctggtcttgaactcctgacctcaggtgatccgcccgcctctgcctcccaaagtgctgggattacaggtgtaagccatcacacctggccctagtgacaggtttttatgggtacttttagatgatctaagaaatcatgtgcatatatctttcagatttctattttgggaaaatgaaggtttctacaacatattgtttcagtgttcaaataaactgaaggactcaacattacatttgaactatatccttcctagtgggttagtgtgaaaaagagtttggctgattcctaaaactctgccagccctgcagtaatctccagggcctggttattgttcagacattccatggtgattcctgggaaggaagcttggctgctcagtttctgagtctggggtgagataatgttctgggaagggacatctgttctttggtgtaatctctcatggtgaaatctgctctgtacatcagacaattgcattgctaccaagtttcataccaaatatttgaaaggatggtattgaatctaaaaccaaatattagtttttattaaactcatgggaaggctaatatattccaacgtaaattattacatatggttaagtaattgcatgttaatttattttaatgtaaatatttttgttactgttctgagccaaattctaaagaaaaaataaatacatttccttgttgaaaaaaaaaaaaaaaaaa

SEQ ID NO: 88 - DNA, 1228 bp, Homo sapiens
acttcacgtgaccgcgcggcggccgctgcggcgcgatggcggcggggctggcgcggctcctgttgctcctcgggctctcggccggcgggcccgcgccggcaggtgcagcgaagatgaaggtggtggaggagcccaacgcgtttggggtgaacaacccgttcttgcctcaggccagtcgcctccaggccaagagggatccttcacccgtgtctggacccgtgcatctcttccgactctcgggcaagtgcttcagcctggtggagtccacgtacaagtatgagttctgcccgttccacaacgtgacccagcacgagcagaccttccgctggaacgcctacagtgggatcctcggcatctggcacgagtgggagatcgccaacaacaccttcacgggcatgtggatgagggacggtgacgcctgccgttcccggagccggcagagcaaggtggagctggcgtgtggaaaaagcaaccggctggcccatgtgtccgagccgagcacctgcgtctacgcgctgacgttcgagacccccctcgtctgccacccccacgccttgctagtgtacccaaccctgccagaggccctgcagcggcagtgggaccaggtagagcaggacctggccgatgagctgatcaccccccagggccatgagaagttgctgaggacactttttgaggatgctggctacttaaagaccccagaagaaaatgaacccacccagctggagggaggtcctgacagcttggggtttgagaccctggaaaactgcaggaaggctcataaagaactctcaaaggagatcaaaaggctgaaaggtttgctcacccagcacggcatcccctacacgaggcccacagaaacttccaacttggagcacttgggccacgagacgcccagagccaagtctccagagcagctgcggggtgacccaggactgcgtgggagtttgtgaccttgtggtgggagagcagaggtggacgcggccgagagccctacagagaagctggctggtaggacccgcagggaccagctgaccaggcttgtgctcagagaagcagacaaaacaaagattcaaggttttaattaattcccatactgataaaaataactccatgaattctgtaaaccattgcataaatgctatagtgtaaaaaaatttaaacaagtgttaactttaaacagttcgctacaagtaaatgattataaatactaaaaaaaaaaaaaaaa

SEQ ID NO: 89 - DNA, 2105 bp, Homo sapiens
cggaagtgcgggcgagcgcgggtccccgggtctgacaggagcagcctgtgggcaccgcggcggtagttggaggcgggagagggtccgtagccgcgccgccctgccccgccatgggcctcctgtcggacccggttcgccggcgcgcgctcgcccgcctagtgctgcgcctcaacgcgccgttgtgcgtgctgagctacgtggcgggcatcgcctggttcttggcgctggttttcccgccgctgacccagcgcacttacatgtcggagaacgccatgggctccaccatggtggaggagcagtttgcgggcggagaccgtgcccgggcttttgcccgggacttcgccgcccaccgcaagaagtcgggggctctgccagtggcctggcttgaacggacgatgcggtcagtagggctggaggtctacacgcagagtttctcccggaaactgcccttcccagatgagacccacgagcgctatatggtgtcgggcaccaacgtgtacggcatcctgcgggccccgcgtgctgccagcaccgagtcgcttgtgctcaccgtgccctgtggctctgactctaccaacagccaggctgtggggctgctgctggcactggctgcccacttccgggggcagatttattgggccaaagatatcgtcttcctggtaacagaacatgaccttctgggcactgaggcttggcttgaagcctaccacgatgtcaatgtcactggcatgcagtcgtctcccctgcagggccgagctggggccattcaggcagccgtggccctggagctgagcagtgatgtggtcaccagcctcgatgtggccgtggaggggcttaacgggcagctgcccaaccttgacctgctcaatctcttccagaccttctgccagaaagggggcctgttgtgcacgcttcagggcaagctgcagcccgaggactggacatcattggatggaccgctgcagggcctgcagacactgctgctcatggttctgcggcaggcctccggccgcccccacggctcccatggcctcttcctgcgctaccgtgtggaggccctaaccctgcgtggcatcaatagcttccgccagtacaagtatgacctggtggcagtgggcaaggctttggagggcatgttccgcaagctcaaccacctcctggagcgcctgcaccagtccttcttcctctacttgctccccggcctctcccgcttcgtctccatcggcctctacatgcccgctgtcggcttcttgctcctggtccttggtctcaaggctctggaactgtggatgcagctgcatgaggctggaatgggccttgaggagcccgggggtgcccctggccccagtgtaccccttcccccatcacagggtgtggggctggcctcgctcgtggcacctctgctgatctcacaggccatgggactggccctctatgtcctgccagtgctgggccaacacgttgccacccagcacttcccagtggcagaggctgaggctgtggtgctgacactgctggcgatttatgcagctggcctggccctgccccacaatacccaccgggtggtaagcacacaggccccagacaggggctggatggcactgaagctggtagccctgatctacctagcactgcagctgggctgcatcgccctcaccaacttctcactgggcttcctgctggccaccaccatggtgcccactgctgcgcttgccaagcctcatgggccccggaccctctatgctgccctgctggtgctgaccagcccggcagccacgctccttggcagcctgttcctgtggcgggagctgcaggaggcgccactgtcactggccgagggctggcagctcttcctggcagcgctagcccagggtgtgctggagcaccacacctacggcgccctgctcttcccactgctgtccctgggcctctacccctgctggctgcttttctggaatgtgctcttctggaagtgagatctgcctgtccgggctgggacagagactccccaaggaccccattctgcctccttctggggaaataaatgagtgtctgtttcagcagctaaaaaaaaaaaaaaaaaaaaaaaaaaaaaaaaaaaaaaa

SEQ ID NO: 90 - DNA, 2091 bp, Homo sapiens
gagcggagccgcgggcgggagggcggacggaccgactgacggtagggacgggaggcgagcaagatggcgcagacgcagggcacccggaggaaagtctgttactactacgacggggatgttggaaattactattatggacaaggccacccaatgaagcctcaccgaatccgcatgactcataatttgctgctcaactatggtctctaccgaaaaatggaaatctatcgccctcacaaagccaatgctgaggagatgaccaagtaccacagcgatgactacattaaattcttgcgctccatccgtccagataacatgtcggagtacagcaagcagatgcagagattcaacgttggtgaggactgtccagtattcgatggcctgtttgagttctgtcagttgtctactggtggttctgtggcaagtgctgtgaaacttaataagcagcagacggacatcgctgtgaattgggctgggggcctgcaccatgcaaagaagtccgaggcatctggcttctgttacgtcaatgatatcgtcttggccatcctggaactgctaaagtatcaccagagggtgctgtacattgacattgatattcaccatggtgacggcgtggaagaggccttctacaccacggaccgggtcatgactgtgtcctttcataagtatggagagtacttcccaggaactggggacctacgggatatcggggctggcaaaggcaagtattatgctgttaactacccgctccgagacgggattgatgacgagtcctatgaggccattttcaagccggtcatgtccaaagtaatggagatgttccagcctagtgcggtggtcttacagtgtggctcagactccctatctggggatcggttaggttgcttcaatctaactatcaaaggacacgccaagtgtgtggaatttgtcaagagctttaacctgcctatgctgatgctgggaggcggtggttacaccattcgtaacgttgcccggtgctggacatatgagacagctgtggccctggatacggagatccctaatgagcttccatacaatgactactttgaatactttggaccagatttcaagctccacatcagtccttccaatatgactaaccagaacacgaatgagtacctggagaagatcaaacagcgactgtttgagaaccttagaatgctgccgcacgcacctggggtccaaatgcaggcgattcctgaggacgccatccctgaggagagtggcgatgaggacgaagacgaccctgacaagcgcatctcgatctgctcctctgacaaacgaattgcctgtgaggaagagttctccgattctgaagaggagggagaggggggccgcaagaactcttccaacttcaaaaaagccaagagagtcaaaacagaggatgaaaaagagaaagacccagaggagaagaaagaagtcaccgaagaggagaaaaccaaggaggagaagccagaagccaaaggggtcaaggaggaggtcaagttggcctgaatggacctctccagctctggcttcctgctgagtccctcacgtttcttccccaacccctcagattttatattttctatttctctgtgtatttatataaaaatttattaaatataaatatccccagggacagaaaccaaggccccgagctcagggcagctgtgctgggtgagctcttccaggagccaccttgccacccattcttcccgttcttaactttgaaccataaagggtgccaggtctgggtgaaagggatacttttatgcaaccataagacaaactcctgaaatgccaagtgcctgcttagtagctttggaaaggtgcccttattgaacattctagaaggggtggctgggtcttcaaggatctcctgtttttttcaggctcctaaagtaacatcagccatttttagattggttctgttttcgtaccttcccactggcctcaagtgagccaagaaacactgcctgccctctgtctgtcttctcctaattctgcaggtggaggttgctagtctagtttcctttttgagatactattttcatttttgtgagcctctttgtaataaaatggtacatttct

SEQ ID NO: 91 - DNA, 1209 bp, Homo sapiens
aggagcgtttttggagaaagctgcactctgttgagctccagggcgcagtggagggagggagtgaaggagctctctgtacccaaggaaagtgcagctgagactcagacaagattacaatgaaccaactcagcttcctgctgtttctcatagcgaccaccagaggatggagtacagatgaggctaatacttacttcaaggaatggacctgttcttcgtctccatctctgcccagaagctgcaaggaaatcaaagacgaatgtcctagtgcatttgatggcctgtattttctccgcactgagaatggtgttatctaccagaccttctgtgacatgacctctgggggtggcggctggaccctggtggccagcgtgcacgagaatgacatgcgtgggaagtgcacggtgggcgatcgctggtccagtcagcagggcagcaaagcagtctacccagagggggacggcaactgggccaactacaacacctttggatctgcagaggcggccacgagcgatgactacaagaaccctggctactacgacatccaggccaaggacctgggcatctggcacgtgcccaataagtcccccatgcagcactggagaaacagctccctgctgaggtaccgcacggacactggcttcctccagacactgggacataatctgtttggcatctaccagaaatatccagtgaaatatggagaaggaaagtgttggactgacaacggcccggtgatccctgtggtctatgattttggcgacgcccagaaaacagcatcttattactcaccctatggccagcgggaattcactgcgggatttgttcagttcagggtatttaataacgagagagcagccaacgccttgtgtgctggaatgagggtcaccggatgtaacactgagcaccactgcattggtggaggaggatactttccagaggccagtccccagcagtgtggagatttttctggttttgattggagtggatatggaactcatgttggttacagcagcagccgtgagataactgaggcagctgtgcttctattctatcgttgagagttttgtgggagggaacccagacctctcctcccaaccatgagatcccaaggatggagaacaacttacccagtagctagaatgttaatggcagaagagaaaacaataaatcatattgactcaaaaaaaaaaaaaaaaaaaaaaaaaaaaa

SEQ ID NO: 92 - DNA, 1150 bp, Homo sapiens
gcaggggagctccgagtgtccacaggaagggaactatcagctcctggcatctgtaaggatgctgtccatgctgaggacaatgaccagactctgcttcctgttattcttctctgtggccaccagtgggtgcagtgcagcagcagcctcttctcttgagatgctctcgagggaattcgaaacctgtgccttctccttttcttccctgcctagaagctgcaaagaaatcaaggaacgctgccatagtgcaggtgatggcctgtattttctccgcaccaagaatggtgttgtctaccagaccttctgtgacatgacttctgggggtggcggctggaccctggtggccagcgtgcacgagaatgacatgcgtgggaagtgcacggtgggtgatcgctggtccagtcagcagggcaacaaagcagactacccagagggggatggcaactgggccaactacaacacctttggatctgcagaggcggccacgagcgatgactacaagaaccctggctactacgacatccaggccaaggacctgggcatctggcatgtgcccaacaagtcccccatgcagcattggagaaacagcgccctgctgaggtaccgcaccaacactggcttcctccagagactgggacataatctgtttggcatctaccagaaatacccagtgaaatacagatcagggaaatgttggaatgacaatggcccagccatacctgtggtctatgactttggtgatgctaagaagactgcatcttattactcaccgtatggtcaacgggaatttgttgcaggattcgttcagttccgggtgtttaataacgagagagcagccaacgccctttgtgctgggataaaagttactggctgtaacactgagcatcactgcatcggtggaggagggttcttcccacagggcaaaccccgtcagtgtggggacttctccgcctttgactgggatggatatggaactcacgttaagagcagctgcagtcgggagataacggaggcggctgtactcttgttctatagatgagacagagctctgcggtgtcagggcgagaacccatcttccaaccccggctatttggagacggaaaaactggaattctaacaaggaggagaggagactaaatcacatcaatttgca

SEQ ID NO: 93 - DNA, 1575 bp, Homo sapiens
ctcttcccggctccagctccgccgccagctccagcctttgctccccctcccaaagtcccctccccggagcggagcgcacctagggtccctcttccgtccccccagcccagctacccgttcagaccagcagcctcggggggcacccccccgccagcctgcctccctcccgctcagccctgccagggttccccagccatgaatctcttccgattcctgggagacctctcccacctcctcgccatcatcttgctactgctcaaaatctggaagtcccgctcgtgcgccggaatttcagggaagagccaggtcctgtttgctgtggtgttcactgcccgatatctggacctcttcaccaactacatctcactctacaacacgtgtatgaaggtggtctacatagcctgctccttcaccacggtctggttgatttatagcaagttcaaagctacttacgatgggaaccatgacacgttcagagtggagttcctggtcgttcccacagccattctggcgttcctggtcaatcatgacttcacccctctggagatcctctggaccttctccatctacctggagtcagtggccatcttgccgcagctgttcatggtgagcaagaccggcgaggcggagaccatcaccagccactacttgtttgcgctaggcgtttaccgcacgctctatctcttcaactggatctggcgctaccatttcgagggcttcttcgacctcatcgccattgtggcaggcctggtccagacagtcctctactgcgatttcttctacctctatatcaccaaagtcctaaaggggaagaagttgagtttgccggcatagccccggtcctctccatctctctcctcggcagcagcgggaggcagaggaaggcggcagaagatgaagagctttcccatccaggggtgacttttttaagaacccacctcttgtgctccccatcccgcctcctgccgggtttcagggggacagtggaggatccaggtcttggggagctcaggacttgggctgtttgtagttttttgccttttagacaagaaaaaaaaatctttccactctttagtttttgattctgatgactcgtttttcttctactctgtggccccaatttttataaagtgtttttgagtgtcctatgggccggggcagggtccaagatcttttcccttccccaggcccctcggctccctcccagatcccacccccagccccactggttgccaaacactaaatctgccgacacccatctgccccacctcctgccatggccatgaaccgcgacccccactaaatttctagattggggatagggagaaagggaggcccaggaaggtctcccctgattttttttcatagtaatttttttccccagagtttgaattttttggtcttctcctggttttttggcaaattaggggggcccggggctcaagtgcgggaagggggctggcccgaggatcccatggctctcacaccatgtttttgtacagaactgatggttgaatctttgttctcttgaaataaacagaagaaaatgaaacctttaaaaaaaaaaaaaaaaaa

SEQ ID NO: 94 - DNA, 1153 bp, Homo sapiens
gccgccgccgccatgaacattttccggctgactggggacctgtcccacctggcggccatcgtcatcctgctgctgaagatctggaagacgcgctcctgcgccggtatttctgggaaaagccagcttctgtttgcactggtcttcacaactcgttacctggatctttttacttcatttatttcattgtataacacatctatgaaggttatctaccttgcctgctcctatgccacagtgtacctgatctacctgaaatttaaggcaacctacgatggaaatcatgataccttccgagtggagtttctggtggtccctgtgggaggcctctcatttttagttaatcacgatttctctcctcttgagatcctctggaccttctccatctacctggagtccgtggctatccttccgcagctgtttatgatcagcaagactggggaggccgagaccatcaccacccactacctgttcttcctgggcctctatcgtgctttgtatcttgtcaactggatctggcgcttctactttgagggcttctttgacctcattgctgtggtggccggcgtagtccagaccatcctatactgtgacttcttctacttgtacattacaaaagtactcaagggaaagaagctcagtttgccagcataagtgccaaagaccatcaccagcatctgtccttcagggtgctcggacagaattcttaccacagcaaaggcataagatgcttgatacggaaaatcagaaacttaactcttttgttgcagatagtcatcagtggctctgtaaaaacgcagaggaaaagagccagaaggtttctgtttaatgcatcttgccttatctttttttattactgtgtacaaagatttttttacacaaagaaacttaatgctgtattaataaattcagtgtgtagcttcaattgggatagttccaaaagtgaagattttgtgaggaataagtgcaaattttttttttattttaaaaaattctttgaaactcttaagtctttgtgtctgcaatgaaattgtactccttgacagttgatagattatgtattcttccatccctcaaacttgcattccactatatttattttttggcaaaagatgagctgtatttgtttgaaatctgagacactatgttcaattgg

SEQ ID NO: 95 - DNA, 2377 bp, Homo sapiens
gaaccctgaagtcggtgtctgctgcgttcacggcaggattcggttaggaggaacagcacagcatgctgggctctggatttaaagctgagcgcttaagagtgaatttgagattagtcataaatcgccttaaactattggagaaaaagaaaacggaactggcccagaaagcaaggaaggagattgctgactatctggctgctgggaaagatgaacgagctcggatccgtgtggagcacattatccgggaagactacctcgtggaggccatggagatcctggagctgtactgtgacctgctgctggctcggtttggccttatccagtctatgaaggaactagattctggtctggctgaatctgtgtctacattgatctgggctgctcctcgactccagtcagaagtggctgagttgaaaatagttgctgatcagctctgtgccaagtatagcaaggaatatggcaagctatgtaggaccaaccagattggaactgtgaatgacaggctaatgcacaagctgagtgtggaagccccacccaaaatcctggtggagagatacctgattgaaattgcaaagaattacaacgtaccctatgaacctgactctgtggtcatggcagaagctcctcctggggtagagacagatcttattgatgttggattcacagatgatgtgaagaaaggaggccctggaagaggagggagtggtggcttcacagcaccagttggtggacctgatggaacggtgccaatgcccatgcccatgcccatgcctatgccatctgcaaatacgcctttctcatatccactgccaaagggaccatcagatttcaatggactgccaatggggacttatcaggcctttcccaatattcatccacctcagataccagcaactcccccatcgtatgaatctatgacattaatgctgataagaatatctcttctgcacagattgttggtcctggacccaagccagaagcctctgcaaagcttccttccagacctgcagataactatgacaactttgtcctaccagagttgccatctgtgccagacacactaccaactgcatctgctggtgccagcacctcagcatctgaagacattgactttgatgatctttcccggaggtttgaagagctgaaaaagaaaacataggtctcttaaaccaggcaactttcacgttttgggagttgagactgagcaatttctccttgtaacaaagaatctccatgaaattctgtttcatctgttaaccgtcactcagcacaacactccctctgggctctcttcctgctcctccagattctgctgctttccagttctctgttgatcctgagactaacaattggagactgaggccagagcaactggctcctggcagctgtgcttgtccgtttcctgtcagagtgatcccaggtttcctcctggcccgtcccatggtccctccacaggagtgtgagaggatgggggaagcactgtgggaagaccaccaaagatggctggacagtgggagagagcacgttgtgaagcatcccagcctcgtgttgaggttccagacttagaaacagacccctctgtacagggggattgtggtgagtgagaatcaaggccaccttgtgtgttttctcactctcgaatgcaagtgggagagggaaaatgactcgggacgccattgtaacggttcctggaagctgggccctctcattggcatatacagtactcctcgctgcagggcactgtcccaccgggatccagttgcaaagtttgtcttgacagttgaaggcctcgcttagttgtactggattctcagggagccctctgtggccttttgctttgcgtgctgtttcccttgtaccagagggcggcaccgtggaaattctgttttccctgtagcatattgtgttggattgcattactggcagagaaaggacaaggtgccattcaagtcctagggtgggcttccagctgccttaatagaagtactcaagtcttttgggtagtgagctggaaagcctacaggaaaagaggggtacctgttttcatttgaaaactttgattcatggaacctttaaaactaatctcagaaaaatttttggtgcccatgcagctgtagttgttcactgctttcctggatggatgggactcttatgtcataacttctgttactcctttggcccatagctaaggtcatccttccccacaggggtggctttgggattggatgatacagcttttgcttctgtgtagtatacctgtacatacttgtttcaggcagcctttctttaatgttttcagttggtttgtattctgtagctcagtagctgctaataaagttaaagatcctgaaaaaaaaaaaaaaaaaaaaaaaaaaaa

SEQ ID NO: 96 - DNA, 586 bp, Homo sapiens
agttaaaagggtgggagcgtccgggggcccatctctctcgggtggagtcttctgacagctggtgcgcctgcccgggaacatcctcctggactcaatcatggcttgtggtctggtcgccagcaacctgaatctcaaacctggagagtgccttcgagtgcgaggcgaggtggctcctgacgctaagagcttcgtgctgaacctgggcaaagacagcaacaacctgtgcctgcacttcaaccctcgcttcaacgcccacggcgacgccaacaccatcgtgtgcaacagcaaggacggcggggcctgggggaccgagcagcgggaggctgtctttcccttccagcctggaagtgttgcagaggtgtgcatcaccttcgaccaggccaacctgaccgtcaagctgccagatggatacgaattcaagttccccaaccgcctcaacctggaggccatcaactacatggcagctgacggtgacttcaagatcaaatgtgtggcctttgactgaaatcagccagcccatggcccccaataaaggcagctgcctctgctccctctgaaaaaaaaaaaaaaaaaaaaaaaaaaaaaa

SEQ ID NO: 97 - DNA, 1696 bp, Homo sapiens
acaaaccctcgttggccccacagggagccagcctctggcttctctctgcaatggccatgtgctgcagacccggagtgggtagttagttggttaatgccagtcttcctcccctggacactgagttctgctgacagcccccgcccagccagagctctgctgtataccaccgggagtggggctggtgtggagcctggaggtcgcccgctgccctcctagggctgctccagacagcattaaaacgctgcaggtcgcaggtgagactaacagctgggagagctgctccaggcatttaggaccctgactggggcagatgagtcagcccagtgggggcagggctcctggaacgaggatctacagttggagttgccccactgtcatgtcacctggagaaaaactggacccaattcctgacagcttcattctgcaaccaccagtcttccacccggtggttccttatgtcacgacgatttttggaggcctgcatgcaggcaagatggtcatgctgcaaggagtggtccctctagatgcacacaggtttcaggtggacttccagtgtggctgcagcctgtgtccccggccagatatcgccttccacttcaaccctcgcttccataccaccaagccccatgtcatctgcaacaccctgcatggtggacgctggcaaagggaggcccggtggccccacctggccctgcgaagaggctccagcttcctcatcctctttctcttcgggaatgaggaagtgaaggtgagtgtgaatggacagcactttctccacttccgctaccggctcccactgtctcatgtggacacgctgggtatatttggtgacatcctggtagaggctgttggattcctgaacatcaatccatttgtggagggcagcagagagtacccagctggacatcctttcctgctgatgagccccaggctggaggtgccctgctcacatgctcttccccagggtctctcgcctgggcaggtcatcatagtacggggactggtcttgcaagagccgaagcattttactgtgagcctgagggaccaggctgcccatgctcctgtgacactcagggcctccttcgcagacagaactctggcctggatctcccgctgggggcagaagaaactgatctcagcccccttcctcttttacccccagagattctttgaggtgctgctcctgttccaggagggagggctgaagctggcgctcaatgggcaggggctgggggccaccagcatgaaccagcaggccctggagcagctgcgggagctccggatcagtggaagtgtccagctctactgtgtccactcctgaggatggttccaggggaaataccgccagaaaacaagaaggtcagcccactcccagggccccactctcctcccctcattaaaccatccacctgacaccagcacatcaggcctggttcacctctggggtcacgagactgagtctacaggagctttgggcctgagggaaggcacaagagtgcaaaggttcctcgaactctgcaccttcctccaccaggagcctgggatatggctccatctgccttcagggcctggactgcactcacagaggcaagtgttgtagactaacaaagatactccaaaatacaatggcttaaagaatgtggtcatttattctttattatttatttatttgtggtcaaataaataaataaggtta

SEQ ID NO: 98 - DNA, 610 bp, Homo sapiens
actggactcaattctgaaggtcgccaagaaggagagaacaatgtcttctttacccgtgccatacaaactgcctgtgtctttgtctgttggttcctgcgtgataatcaaagggacaccaatccactcttttatcaatgacccacagctgcaggtggatttctacactgacatggatgaggattcagatattgccttccgtttccgagtgcactttggcaatcatgtggtcatgaacaggcgtgagtttgggatatggatgttggaggagacaacagactacgtgccctttgaggatggcaaacaatttgagctgtgcatctacgtacattacaatgagtatgagataaaggtcaatggcatacgcatttacggctttgtccatcgaatcccgccatcatttgtgaagatggtgcaagtgtcgagagatatctccctgacctcagtgtgtgtctgcaattgagggagatgatcacactcctcattgttgaggaatccctctttctacctgaccatgggattcccagaacctgctaacagaataatccctgctcacattttcccctacactttgtcattaaaacagcacgaaaactcaaaaaaaaaaaaaaaa

SEQ ID NO: 99 - DNA, 794 bp, Homo sapiens
gctgcattacagacacagacctgcaaacatctatggttgtgacagagtttctttctgacacctgagtctttctcctgctgcacggaaagcttgctgggaggggcttggaatctggcatgaagccaaagggcatctctgagttgcagcatttaaatgatcccactcagagattcacacagaagactggacacaattccgaagagctgcccagaaggagagaacaatgtcatcactacccgtaccatacacactgcctgtttccttgcctgttggttcgtgcgtgataatcacagggacaccgatcctcacttttgtcaaggacccacagctggaggtgaatttctacactgggatggatgaggactcagatattgctttccaattccgactgcactttggtcatcctgcaatcatgaacagttgtgtgtttggcatatggagatatgaggagaaatgctactatttaccctttgaagatggcaaaccatttgagctgtgcatctatgtgcgtcacaaggaatacaaggtaatggtaaatggccaacgcatttacaactttgcccatcgattcccgccagcatctgtgaagatgctgcaagtcttcagagatatctccctgaccagagtgcttatcagcgattgagggagatgatcagactcctcattgttgaggaatccctctttctacctgaccatgggattcccagagcctactaacagaataatccctcctcaccccttcccctacacttgatcattaaaacagcaccaaacttcaaaaaaaaaaaaaaaaa

SEQ ID NO: 100 - DNA, 543 bp, Homo sapiens
gaccttgagggagttaatgtgtaatattctaggatataagcttgaccacgagttgagaccctgagcacaggcctccaggagccgctgggagctgccgccaggagctgtcaccatgacgggggaacttgaggttaagaacatggacatgaagccggggtcaaccctgaagatcacaggcagcatcgccgatggcactgatggctttgtaattaatctgggccaggggacagacaagctgaacctgcatttcaaccctcgcttcagcgaatccaccattgtctgcaactcattggacggcagcaactgggggcaagaacaacgggaagatcacctgtgcttcagcccagggtcagaggtcaagttcacagtgacctttgagagtgacaaattcaaggtgaagctgccagatgggcacgagctgacttttcccaacaggctgggtcacagccacctgagctacctgagcgtaaggggcgggttcaacatgtcctctttcaagttaaaagaataaaagacttccagccgagaaaaaaaaaaaaaaaa

SEQ ID NO: 101 - DNA, 1080 bp, Homo sapiens
ggagaggactggctgggcaggggcgccgccccgcctcgggagaggcgggccgggcggggctgggagtatttgaggctcggagccaccgccccgccggcgcccgcagcacctcctcgccagcagccgtccggagccagccaacgagcggaaaatggcagacaatttttcgctccatgatgcgttatctgggtctggaaacccaaaccctcaaggatggcctggcgcatgggggaaccagcctgctggggcagggggctacccaggggcttcctatcctggggcctaccccgggcaggcacccccaggggcttatcctggacaggcacctccaggcgcctaccctggagcacctggagcttatcccggagcacctgcacctggagtctacccagggccacccagcggccctggggcctacccatcttctggacagccaagtgccaccggagcctaccctgccactggcccctatggcgcccctgctgggccactgattgtgccttataacctgcctttgcctgggggagtggtgcctcgcatgctgataacaattctgggcacggtgaagcccaatgcaaacagaattgctttagatttccaaagagggaatgatgttgccttccactttaacccacgcttcaatgagaacaacaggagagtcattgtttgcaatacaaagctggataataactggggaagggaagaaagacagtcggttttcccatttgaaagtgggaaaccattcaaaatacaagtactggttgaacctgaccacttcaaggttgcagtgaatgatgctcacttgttgcagtacaatcatcgggttaaaaaactcaatgaaatcagcaaactgggaatttctggtgacatagacctcaccagtgcttcatataccatgatataatctgaaaggggcagattaaaaaaaaaaaaagaatctaaaccttacatgtgtaaaggtttcatgttcactgtgagtgaaaatttttacattcatcaatatccctcttgtaagtcatctacttaataaatattacagtgaattacctgtctcaatatgtcaaaaaaaaaaaaaaaaaa

SEQ ID NO: 102 - DNA, 2254 bp, Homo sapiens
aatcgaaagtagactcttttctgaagcatttcctgggatcagcctgaccacgctccatactgggagaggcttctgggtcaaaggaccagtctgcagagggatcctgtggctggaagcgaggaggctccacacggccgttgcagctaccgcagccaggatctgggcatccaggcacggccatgacccctccgaggctcttctgggtgtggctgctggttgcaggaacccaaggcgtgaacgatggtgacatgcggctggccgatgggggcgccaccaaccagggccgcgtggagatcttctacagaggccagtggggcactgtgtgtgacaacctgtgggacctgactgatgccagcgtcgtctgccgggccctgggcttcgagaacgccacccaggctctgggcagagctgccttcgggcaaggatcaggccccatcatgctggacgaggtccagtgcacgggaaccgaggcctcactggccgactgcaagtccctgggctggctgaagagcaactgcaggcacgagagagacgctggtgtggtctgcaccaatgaaaccaggagcacccacaccctggacctctccagggagctctcggaggcccttggccagatctttgacagccagcggggctgcgacctgtccatcagcgtgaatgtgcagggcgaggacgccctgggcttctgtggccacacggtcatcctgactgccaacctggaggcccaggccctgtggaaggagccgggcagcaatgtcaccatgagtgtggatgctgagtgtgtgcccatggtcagggaccttctcaggtacttctactcccgaaggattgacatcaccctgtcgtcagtcaagtgcttccacaagctggcctctgcctatggggccaggcagctgcagggctactgcgcaagcctctttgccatcctcctcccccaggacccctcgttccagatgcccctggacctgtatgcctatgcagtggccacaggggacgccctgctggagaagctctgcctacagttcctggcctggaacttcgaggccttgacgcaggccgaggcctggcccagtgtccccacagacctgctccaactgctgctgcccaggagcgacctggcggtgcccagcgagctggccctactgaaggccgtggacacctggagctggggggagcgtgcctcccatgaggaggtggagggcttggtggagaagatccgcttccccatgatgctccctgaggagctctttgagctgcagttcaacctgtccctgtactggagccacgaggccctgttccagaagaagactctgcaggccctggaattccacactgtgcccttccagttgctggcccggtacaaaggcctgaacctcaccgaggatacctacaagccccggatttacacctcgcccacctggagtgcctttgtgacagacagttcctggagtgcacggaagtcacaactggtctatcagtccagacgggggcctttggtcaaatattcttctgattacttccaagccccctctgactacagatactacccctaccagtccttccagactccacaacaccccagcttcctcttccaggacaagagggtgtcctggtccctggtctacctccccaccatccagagctgctggaactacggcttctcctgctcctcggacgagctccctgtcctgggcctcaccaagtctggcggctcagatcgcaccattgcctacgaaaacaaagccctgatgctctgcgaagggctcttcgtggcagacgtcaccgatttcgagggctggaaggctgcgattcccagtgccctggacaccaacagctcgaagagcacctcctccttcccctgcccggcagggcacttcaacggcttccgcacggtcatccgccccttctacctgaccaactcctcaggtgtggactagacgcgtggccaagggtggtgagaaccggagaaccccaggacgccctcactgcaggctcccctcctcggcttccttcctctctgcaatgaccttcaacaaccggccaccagatgtcgccctactcacctgaggctcagcttcaagaaattactggaaggcttccactagggtccaccaggagttctcccaccacctcaccagtttccaggtggtaagcaccaggaggccctcgaggttgctctggatccccccacagcccctggtcagtctgcccttgtcactggtctgaggtcattaaaattacattgaggttccta

SEQ ID NO: 103 - DNA, 1117 bp, Homo sapiens
atctcccactcctgcagctcttctcacaggaccagccactagcgcagcctcgagcgatggcctatgtccccgcaccgggctaccagcccacctacaacccgacgctgccttactaccagcccatcccgggcgggctcaacgtgggaatgtctgtttacatccaaggagtggccagcgagcacatgaagcggttcttcgtgaactttgtggttgggcaggatccgggctcagacgtcgccttccacttcaatccgcggtttgacggctgggacaaggtggtcttcaacacgttgcagggcgggaagtggggcagcgaggagaggaagaggagcatgcccttcaaaaagggtgccgcctttgagctggtcttcatagtcctggctgagcactacaaggtggtggtaaatggaaatcccttctatgagtacgggcaccggcttcccctacagatggtcacccacctgcaagtggatggggatctgcaacttcaatcaatcaacttcatcggaggccagcccctccggccccagggacccccgatgatgccaccttaccctggtcccggacattgccatcaacagctgaacagcctgcccaccatggaaggacccccaaccttcaacccgcctgtgccatatttcgggaggctgcaaggagggctcacagctcgaagaaccatcatcatcaagggctatgtgcctcccacaggcaagagctttgctatcaacttcaaggtgggctcctcaggggacatagctctgcacattaatccccgcatgggcaacggtaccgtggtccggaacagccttctgaatggctcgtggggatccgaggagaagaagatcacccacaacccatttggtcccggacagttctttgatctgtccattcgctgtggcttggatcgcttcaaggtttacgccaatggccagcacctctttgactttgcccatcgcctctcggccttccagagggtggacacattggaaatccagggtgatgtcaccttgtcctatgtccagatctaatctattcctggggccataactcatgggaaaacagaattatcccctaggactcctttctaagcccctaataaaatgtctgagggtgtctc

SEQ ID NO: 104 - DNA, 498 bp, Homo sapiens
ttaaagcaaagaattccccggtcccagccatgtccaacgtcccccacaagtcctcgctgcccgagggcatccgccctggcacggtgctgagaattcgcggcttggttcctcccaatgccagcaggttccatgtaaacctgctgtgcggggaggagcagggctccgatgccgccctgcatttcaacccccggctggacacgtcggaggtggtcttcaacagcaaggagcaaggctcctggggccgcgaggagcgcgggccgggcgttcctttccagcgcgggcagcccttcgaggtgctcatcatcgcgtcagacgacggcttcaaggccgtggttggggacgcccagtaccaccacttccgccaccgcctgccgctggcgcgcgtgcgcctggtggaggtgggcggggacgtgcagctggactccgtgaggatcttctgagcagaagcccaggcggcccggggccttggctggcaaataaagcgttagcccgcagcgc

SEQ ID NO: 105 - DNA, 2996 bp, Homo sapiens
tggacttggatccgaggcagacgaggaagctgagaaaaccctggcgttgaccccgtggacctgggcgccccgggaaggccagcgcttggtccaggcaggcggggcctgtgcggtgaccaccctggtcctgaaaagtcccagccccgagcgccctccctcctagacctggaggcctggaacagccagccgcccacggacgccagagccgggaaccctgacggcacttagctgctgacaaacaacctgctccgtggagcgcctgaaacaccagtctttggggccagtgcctcagtttcaatccaggtaacctttaaatgaaacttgcctaaaatcttaggtcatacacagaagagactccaatcgacaagaagctggaaaagaatgatgttgtccttaaacaacctacagaatatcatctataacccggtaatcccgtttgttggcaccattcctgatcagctggatcctggaactttgattgtgatacgtgggcatgttcctagtgacgcagacagattccaggtggatctgcagaatggcagcagcatgaaacctcgagccgatgtggcctttcatttcaatcctcgtttcaaaagggccggctgcattgtttgcaatactttgataaatgaaaaatggggacgggaagagatcacctatgacacgcctttcaaaagagaaaagtcttttgagatcgtgattatggtgctgaaggacaaattccaggtggctgtaaatggaaaacatactctgctctatggccacaggatcggcccagagaaaatagacactctgggcatttatggcaaagtgaatattcactcaattggttttagcttcagctcggacttacaaagtacccaagcatctagtctggaactgacagagataagtagagaaaatgttccaaagtctggcacgccccagcttcctagtaatagaggaggagacatttctaaaatcgcacccagaactgtctacaccaagagcaaagattcgactgtcaatcacactttgacttgcaccaaaataccacctatgaactatgtgtcaaagaggctgccattcgctgcaaggttgaacacccccatgggccctggacgaactgtcgtcgttaaaggagaagtgaatgcaaatgccaaaagctttaatgttgacctactagcaggaaaatcaaaggatattgctctacacttgaacccacgcctgaatattaaagcatttgtaagaaattcttttcttcaggagtcctggggagaagaagagagaaatattacctctttcccatttagtcctgggatgtactttgagatgataatttattgtgatgttagagaattcaaggttgcagtaaatggcgtacacagcctggagtacaaacacagatttaaagagctcagcagtattgacacgctggaaattaatggagacatccacttactggaagtaaggagctggtagcctacctacacagctgctacaaaaaccaaaatacagaatggcttctgtgatactggccttgctgaaacgcatctcactgtcattctattgtttatattgttaaaatgagcttgtgcaccattaggtcctgctgggtgttctcagtccttgccatgaagtatggtggtgtctagcactgaatggggaaactgggggcagcaacacttatagccagttaaagccactctgccctctctcctactttggctgactcttcaagaatgccattcaacaagtatttatggagtacctactataatacagtagctaacatgtattgagcacagattttttttggtaaaactgtgaagagctaggatatatacttggtgaaacaaaccagtatgttccctgttctcttgagcttcgactcttctgtgcgctactgctgcgcactgctttttctacaggcattacatcaactcctaaggggtcctctgggattagttatgcagatattaaatcacccgaagacactaacttacagaagacacaactccttccccagtgatcactgtcataaccagtgctctaccgtatcccatcactgaggactgatgttgactgacatcattttctttatcgtaataaacatgtggctctattagctgcaagctttaccaagtaattggcatgacatctgagcacagaaattaaggcaaaaaaccaaagcaaaacaaatacatggtgctgaaattaacttgatgccaagcccaaggcagctgatttctgtgtatttgaacttagggcaaatcagagtctacacagacgcctacagaaagtttcaggaagaggcaagatgcattcaatttgaaagatatttatgggcaacaaagtaaggtcaggattagacttcaggcattcataaggcaggcactatcagaaagtgtacgccaactaagggacccacaaagcaggcagaggtaatgcagaaatctgttttgttcccatgaaatcaccaatcaaggcctccgttcttctaaagattagtccatcatcattagcaactgagatcaaagcactcttccactttacgtgattaaaatcaaacctgtatcagcaagttaaatggttccatttctgtgatttttctattatttgaggggagttggcagaagttccatgtatatgggatctttacaggtcagatcttgttacaggaaatttcaaaggtttgggagtggggagggaaaaaagctcagtcagtgaggatcattttatcacattagactggggcagaactctgccaggatttaggaatattttcagaacagattttagatattatttctatccatatattgaaaagaataccattgtcaatcttatttttttaaaagtactcagtgtagaaatcgctagcccttaattcttttccagcttttcatattaatgtatgcagagtctcaccaagctcaaagacactggttgggggtggagggtgccacagggaaagctgtagaaggcaagaagactcgagaatcccccagagttat

SEQ ID NO: 106 - DNA, 1739 bp, Homo sapiens
tccccattgaataacagccaagttgctttggtttctatttctttgttaagtcgttccctctacaaaggacttcctagtgggtgtgaaaggcagcggtggccacagaggcggcggagagatggccttcagcggttcccaggctccctacctgagtccagctgtccccttttctgggactattcaaggaggtctccaggacggacttcagatcactgtcaatgggaccgttctcagctccagtggaaccaggtttgctgtgaactttcagactggcttcagtggaaatgacattgccttccacttcaaccctcggtttgaagatggagggtacgtggtgtgcaacacgaggcagaacggaagctgggggcccgaggagaggaagacacacatgcctttccagaaggggatgccctttgacctctgcttcctggtgcagagctcagatttcaaggtgatggtgaacgggatcctcttcgtgcagtacttccaccgcgtgcccttccaccgtgtggacaccatctccgtcaatggctctgtgcagctgtcctacatcagcttccagcctcccggcgtgtggcctgccaacccggctcccattacccagacagtcatccacacagtgcagagcgcccctggacagatgttctctactcccgccatcccacctatgatgtacccccaccccgcctatccgatgcctttcatcaccaccattctgggagggctgtacccatccaagtccatcctcctgtcaggcactgtcctgcccagtgctcagaggttccacatcaacctgtgctctgggaaccacatcgccttccacctgaacccccgttttgatgagaatgctgtggtccgcaacacccagatcgacaactcctgggggtctgaggagcgaagtctgccccgaaaaatgcccttcgtccgtggccagagcttctcagtgtggatcttgtgtgaagctcactgcctcaaggtggccgtggatggtcagcacctgtttgaatactaccatcgcctgaggaacctgcccaccatcaacagactggaagtggggggcgacatccagctgacccatgtgcagacataggcggcttcctggccctggggccgggggctggggtgtggggcagtctgggtcctctcatcatccccacttcccaggcccagcctttccaaccctgcctgggatctgggctttaatgcagaggccatgtccttgtctggtcctgcttctggctacagccaccctggaacggagaaggcagctgacggggattgccttcctcagccgcagcagcacctggggctccagctgctggaatcctaccatcccaggaggcaggcacagccagggagaggggaggagtgggcagtgaagatgaagccccatgctcagtcccctcccatcccccacgcagctccaccccagtcccaagccaccagctgtctgctcctggtgggaggtggcctcctcagcccctcctctctgacctttaacctcactctcaccttgcaccgtgcaccaacccttcacccctcctggaaagcaggcctgatggcttcccactggcctccaccacctgaccagagtgttctcttcagaggactggctcctttcccagtgtccttaaaataaagaaatgaaaatgcttgttggcacattcaaaaaaaaaaaaaaaaaaaaaaaaaaaaaaaaaaaaaaaaaaaaaaaaaaaaaaaaaaaaaaaaaaaaaaaa

SEQ ID NO: 107 - DNA, 3547 bp, Homo sapiens
ggaggtgagcaggaaggagacggccgcccagcagcccgtgggcaggcgcggcggagcgagcggggccggcggcgggcgccgagggacgccgaggcctcgggcgggggctggcccggggttccaggtctccagtgggggctgcagactaagcaaaatgaggcggttcctgaggccagggcatgaccctgtgcgggagaggctcaagcgggacctgttccagtttaacaagacggtggagcatggcttcccgcaccagcccagcgccctcggctacagcccgtccctgcgcatcctggccatcggcacccgttctggagccatcaagctctacggagccccaggcgtggagttcatggggctgcaccaggagaacaacgctgtgacgcagatccacctcctgcccggccagtgccagctggtcaccctgctggatgacaacagcctgcacctttggagcctgaaggtcaagggcggggcatcggagctgcaggaggatgagagcttcacactgcgtggacccccaggggctgcccccagtgccacacagatcaccgtggtcctgccacattcctcctgcgagctgctctacctgggcaccgagagtggcaacgtgtttgtggtgcagctgccagcttttcgtgcgctggaggaccggaccatcagctcggacgcggtgctgcagcggttgccagaggaggcccgccaccggcgtgtgttcgagatggtggaggcactgcaggagcaccctcgagaccccaaccagatcctgatcggctacagccgaggcctcgttgtcatctgggacctacagggcagccgcgtgctctaccacttcctcagcagccagcaactggagaacatctggtggcagcgggacggccgcctgctcgtcagctgtcactctgacggcagctactgccagtggcccgtgtccagcgaagcccagcaaccagagcccctccgcagcctcgtgccttacggtccctttccttgcaaagcgattaccagaatcctctggctgaccactaggcaggggttgcccttcaccatcttccagggtggcatgccacgggccagctacggggaccgccactgcatctcagtgatccacgatggccagcagacggccttcgacttcacctcccgtgtcatcggcttcactgtcctcacagaggcagaccctgcagccacctttgacgacccctatgccctggtggtgctggctgaggaggagctggtggtgattgacctgcagacagcaggctggccaccggtccagctgccctacctggcttctctgcactgttccgccatcacctgctctcaccacgtctccaacatcccgctgaagctgtgggagcggatcattgccgccggcagccggcagaacgcacacttctccaccatggagtggccaattgatggtggcaccagcctgaccccagccccaccccagagggacctgctgctcacagggcacgaggacggcacggtgcggttctgggatgcctcgggtgtctgcctgcggctgctctacaaactcagcactgtgcgcgtgttcctcaccgacacggaccccaacgagaacttcagtgcccagggcgaggacgagtggcccccactccgcaaggtgggctcctttgacccctacagtgatgacccccggctgggcatccagaagatcttcctctgcaagtacagcggctacctggctgtggcaggcacggcagggcaggtgctggtactggaactgaatgacgaggcagcggagcaggctgtggagcaggtggaggccgacctgctgcaggaccaagagggctaccgctggaaggggcacgagcgcctggcagcccgctcagggcccgtgcgctttgagcctggctttcagcccttcgtgttggtgcagtgtcagcccccggctgtggtcacctccttggccctgcactctgagtggcggctcgtggccttcggcaccagccatggctttggcctctttgaccaccagcagcggcggcaggtctttgttaagtgcacactgcaccccagtgaccagctggccttggagggcccactctcccgcgtcaagtccctcaagaagtccttgcgtcagtcattccgccggatgcgtcggagccgggtgtccagccggaagcggcacccggctggccccccaggagaggcacaggaggggagtgccaaggctgagcggccaggcctccagaacatggagctggcgcctgtgcagcgcaagatcgaggctcgctcggcagaggactccttcacaggcttcgtccggaccctgtactttgctgacacctacctgaaggacagctcccggcactgcccctcgctgtgggctggcaccaatgggggcaccatctatgccttctccctgcgtgtgcctcccgccgagcggagaatggatgagcctgtgcgggcagagcaggccaaggagatccagctgatgcaccgggcgccggtggtgggcatcctggtgctcgacggacacagcgtaccccttcccgagcccctcgaagtggcccatgatctgtcgaagagccctgacatgcagggaagccaccagctgctcgtcgtatcagaggagcagttcaaggtgttcacgctgcccaaggtgagtgccaagctgaagttgaagctgacggccctggagggctcaagagtgcggcgggtcagcgtggcccacttcggcagtcgtcgagccgaggactacggggagcaccacctggcagtccttaccaacctgggcgacatccaggtggtctcgctgcccctgctcaagccccaggtgcgctacagctgcatccgccgggaggacgtcagtggcatcgcctcctgcgtcttcaccaaatatggccaaggcttctacctgatctcaccctcggagtttgagcgcttctctctctccaccaagtggctggtggagccccggtgtctggtggattcagcagaaaccaagaaccaccgccctggtaacggtgcgggccccaagaaggccccgagccgagccaggaactcagggactcagagtgatggcgaggagaagcagcccggcctggtgatggagcgcgctctgctcagtgatgagagagcggcaactggcgttcacatcgagccgccgtggggtgcagcctcagcaatggcggagcagagtgagtggctgagcgtccaggctgcgcgatgagcacacactactactgatggcctttcgggggtccctgccccaaccggagaggccggtgcacagggccccgccaggggctgggggcatcccggcttccacaatgcagctgctctgggcctcgggagaggagagaccccagtcccctgggctgcccttcccgggcctcgtctgtctgggtcctttggtcaatgttgcacagtttttattgctcccatccctttttgtagtgggctgggttttaagttataaatgttaactgcctctgggtgaaaaagtttttaataaacacctattacctcttgaaaaaaaaaaaaaaaaaaaaaaaaaaaaaaaaaaaaaaaaaaa

SEQ ID NO: 108 - DNA, 1648 bp, Homo sapiens
ggaagttccggcgggggcggccgagggggaagagtgtgtctgcgggagaaagaggagaatcgcccaagcggcctcggaagtcccagggagtggaggcccccgccgtggagccgtgtggtgtatgtgtggtaacaccatgtctgtgcccctgctcaccgatgctgccaccgtgtctggagctgagcgggaaacggccgcggttatttttttacatggacttggagacacagggcacagctgggctgacgccctctccaccatccggctccctcacgtcaagtacatctgtccccatgcgcctaggatccctgtgaccctcaacatgaagatggtgatgccctcctggtttgacctgatggggctgagtccagatgccccagaggacgaggctggcatcaagaaggcagcagagaacatcaaggccttgattgagcatgaaatgaagaacgggatccctgccaatcgaatcgtcctgggaggcttttcacagggcggggccctgtccctctacacggccctcacctgcccccaccctctggctggcatcgtggcgttgagctgctggctgcctctgcaccgggccttcccccaggcagctaatggcagtgccaaggacctggccatactccagtgccatggggagctggaccccatggtgcccgtacggtttggggccctgacggctgagaagctccggtctgttgtcacacctgccagggtccagttcaagacatacccgggtgtcatgcacagctcctgtcctcaggagatggcagctgtgaaggaatttcttgagaagctgctgcctcctgtctaactagtcgctggccccagtgcagtaccccagctcatgggggactcagcaagcaagcgtggcaccatcttggatctgagccggtcgagcccctgtccccacccttcctgacctgtccttttcccacaggcctctgggggcaggtggcaaggcctggccgggccttccttcctggccttagccacctggctctgtctgcagcaggggcaggctgctttcttatccatttccctggaggcgggcccccctggcagcagtattggaggggctacaggcagctggagaaaggggcccagccgctgacccactcactcaggacctcactcactagccccgctttgggccccctcctgtgacctcagggtttggcccatggggcccccccaggcccctgccccaactgattctgcccagataatcgtgtctcctgcctccactcagctgcttctcagtcatgaatgtggccatggccccggggtccccttgctgctgtgggctccctgtccctgggcaggagtgctggtgaggaggtggagccttttgaggggggccttccctcagctgtttccccacactggggggctgggccctgcctccccgttaccctccttccctgcaggcctggagcctgtagggctggactgaggttcaggtctccccccagctgtctcacccccactttgtccccactctagagcagggaggcagtgggggaggagttgtgtctcgtcttctgtctccatgtggtttttgggtgtttttcttgttgtgtcctggattccgataaaattaaagaaattgcttcctcaaaaaaaaaaaaaaaaaaaaaaaaaa

SEQ ID NO: 109 - DNA, 3608 bp, Homo sapiens
gcggccgcttccccccggccgggcccccgccgccccgcggtccccagagcgccaggcccccggggggagggagggagggcgccgggccggtgggagccagcggcgcgcggtgggacccacggagccccgcgacccgccgagcctggagccgggccgggtcggggaagccggctccagcccggagcgaacttcgcagcccgtcggggggcggcggggagggggcccggagccggaggagggggcggccgcgggcacccccgcctgtgccccggcgtccccgggcaccatgctgtccaactcccagggccagagcccgccggtgccgttccccgccccggccccgccgccgcagccccccacccctgccctgccgcaccccccggcgcagccgccgccgccgcccccgcagcagttcccgcagttccacgtcaagtccggcctgcagatcaagaagaacgccatcatcgatgactacaaggtcaccagccaggtcctggggctgggcatcaacggcaaagttttgcagatcttcaacaagaggacccaggagaaattcgccctcaaaatgcttcaggactgccccaaggcccgcagggaggtggagctgcactggcgggcctcccagtgcccgcacatcgtacggatcgtggatgtgtacgagaatctgtacgcagggaggaagtgcctgctgattgtcatggaatgtttggacggtggagaactctttagccgaatccaggatcgaggagaccaggcattcacagaaagagaagcatccgaaatcatgaagagcatcggtgaggccatccagtatctgcattcaatcaacattgcccatcgggatgtcaagcctgagaatctcttatacacctccaaaaggcccaacgccatcctgaaactcactgactttggctttgccaaggaaaccaccagccacaactctttgaccactccttgttatacaccgtactatgtggctccagaagtgctgggtccagagaagtatgacaagtcctgtgacatgtggtccctgggtgtcatcatgtacatcctgctgtgtgggtatccccccttctactccaaccacggccttgccatctctccgggcatgaagactcgcatccgaatgggccagtatgaatttcccaacccagaatggtcagaagtatcagaggaagtgaagatgctcattcggaatctgctgaaaacagagcccacccagagaatgaccatcaccgagtttatgaaccacccttggatcatgcaatcaacaaaggtccctcaaaccccactgcacaccagccgggtcctgaaggaggacaaggagcggtgggaggatgtcaaggggtgtcttcatgacaagaacagcgaccaggccacttggctgaccaggttgtgagcagaggattctgtgttcctgtccaaactcagtgctgtttcttagaatccttttattccctgggtctctaatgggaccttaaagaccatctggtatcatcttctcattttgcagaagagaaactgaggcccagaggcggagggcagtctgctcaaggtcacgcagctggtgactggttggggcagaccggacccaggtttcctgactcctggcccaagtctcttcctcctatcctgcgggatcactggggggctctcagggaacagcagcagtgccatagccaggctctctgctgcccagcgctggggtgaggctgccgttgtcagcgtggaccactaaccagcccgtcttctctctctgctcccacccctgccgccctcaccctgcccttgttgtctctgtctctcacgtctctcttctgctgtctctcctacctgtcttctggctctctctgtacccttcctggtgctgccgtgcccccaggaggagatgaccagtgccttggccacaatgcgcgttgactacgagcagatcaagataaaaaagattgaagatgcatccaaccctctgctgctgaagaggcggaagaaagctcgggccctggaggctgcggctctggcccactgagccaccgcgccctcctgcccacgggaggacaagcaataactctctacaggaatatattttttaaacgaagagacagaactgtccacatctgcctcctctcctcctcagctgcatggagcctggaactgcatcagtgactgaattctgccttggttctggccaccccagagtgggagaggctgggaggttgggaggctgtggagagaagtgagcaaggtgctcttgaacctgtgctcattttgcaattttatcagtaatttgacttagagtttttacgaaacctcttttgttgtccttgccccactcctctccaccagacgccttcctctctggatactgcaaaggcttgtggtttgttagagggtatttgtggaaactgtcatagggattgtccctgtgttgtcccatctgccctccctgtttctccacaacagcctggggttgtccccgctggctcacgcgttctgggagctcaaggccaccttggaggaggatgccacgcacttcctctctcggagccctcagacatctccagtgtgccagacaaataggagtgagtgtatgtgtgtgtgtgtgtgtgtgtgtgtgcacacgtgtgtatgagtgcgcagatctgtgcctgggatcgtgcatttgaggggccaggggcaggcagggctgcagagggagacggccctgctggggcttaggaaccttctcccttcttgggtctgccctgcccatactgagcctgccaaagtgcctgggaagcccacccagattctgaaacaggccctctgtggcctgtctctattagctgggttccgggaggcagagaggagtgaccgggcactggcactgcgatcaggaagactggacccccagcccccagggcccccctccccccacttagtgctggtcctaggtcctctgaggcactcatctactgaatgacctctctacttccccttcttgccattattaacccatttttgtttattttccttaaatttttagccatttctccatgggccaccgcccagctcatgtaggtgagcctgggcagcttctgttggcagagcttttgcatttcctgtgtttgtcctgggttctggggcatcagccagctaccccttgtgggcaaaggcagggccacttttgaagtcttccctcagatttccattgtgtggcctggtgggtcagggggagtctttgcaccaaagatgtcctgactttgcccccttgcccatcagccatttgccatcaccccaaacaactcagcttcggggccggtgaggggaggggcctcccccagcacagatgaggagcagctggggtaggctgtctgtgccatggccccccactcccccttcccttggagggagaggtggcaggaatacttcacctttcctctccctcaggggcaggtggtggaggggcgcccagggtcgtctttgtgtatgggggaaggcgctgggtgcctgcagcgcctcccttgtctcagatggtgtgtccagcactcgattgttgtaaactgttgttttgtatgagcgaaattgtctttactaaacagatttaatagttaaaaaaaaaaaaaaaaaaa

SEQ ID NO: 110 - DNA, 2937 bp, Homo sapiens
gggttgcgccagggagccggaaagccgactcccgaagttggggtcctgggaaaacttgggtcctgggttgactgagaagcggcggggaaaggaggcgggccaggaggagggggcctggcggacgccggccggggggcggggcgcggcggggctgtcggtcacgcccctcagtccgccccgccccgccccgcctgccggggaagggccacgttgcccggcccggccgtccggccccggcgcgccgcagaaagggctggcgagtcgaaaggcgaggcggccgcggcagcgcttgggacgcgcctgggcaccgggctcgctccctgcgccccggagcaggccaagttcggggccaggacgtcgggaggacctggtgcatggctgcctcctaatcccatagtccagaggaggcatccctaggactgcgggcaagggagccgggcaagcccagggcagccttgaaccgtcccctggcctgccctccccggtgggggccaggatgctgaagaagcagtctgcagggcttgtgctgtggggcgctatcctctttgtggcctggaatgccctgctgctcctcttcttctggacgcgcccagcacctggcaggccaccctcagtcagcgctctcgatggcgaccccgccagcctcacccgggaagtgattcgcctggcccaagacgccgaggtggagctggagcggcagcgtgggctgctgcagcagatcggggatgccctgtcgagccagcgggggagggtgcccaccgcggcccctcccgcccagccgcgtgtgcctgtgacccccgcgccggcggtgattcccatcctggtcatcgcctgtgaccgcagcactgttcggcgctgcctggacaagctgctgcattatcggccctcggctgagctcttccccatcatcgttagccaggactgcgggcacgaggagacggcccaggccatcgcctcctacggcagcgcggtcacgcacatccggcagcccgacctgagcagcattgcggtgccgccggaccaccgcaagttccagggctactacaagatcgcgcgccactaccgctgggcgctgggccaggtcttccggcagtttcgcttccccgcggccgtggtggtggaggatgacctggaggtggccccggacttcttcgagtactttcgggccacctatccgctgctgaaggccgacccctccctgtggtgcgtctcggcctggaatgacaacggcaaggagcagatggtggacgccagcaggcctgagctgctctaccgcaccgactttttccctggcctgggctggctgctgttggccgagctctgggctgagctggagcccaagtggccaaaggccttctgggacgactggatgcggcggccggagcagcggcaggggcgggcctgcatacgccctgagatctcaagaacgatgacctttggccgcaagggtgtgagccacgggcagttctttgaccagcacctcaagtttatcaagctgaaccagcagtttgtgcacttcacccagctggacctgtcttacctgcagcgggaggcctatgaccgagatttcctcgcccgcgtctacggtgctccccagctgcaggtggagaaagtgaggaccaatgaccggaaggagctgggggaggtgcgggtgcagtatacgggcagggacagcttcaaggctttcgccaaggctctgggtgtcatggatgaccttaagtcgggggttccgagagctggctaccggggtattgtcaccttccagttccggggccgccgtgtccacctggcgcccccaccgacgtgggagggctatgatcctagctggaattagcacctgcctgtccttcctgggcccctccttgccacatcatgagctgaggtgggaccacagtccccaggctgcatcggcctgcctgtgtttccctcttaggtgcatttatctttttgatttttccgagtggcatttaagtgcacaaatgataacaagaggattattctcccgttctcaagggagtcagatcaggggaactattctagggtatgttgcggggtattaagcaggaaaccactgtgtggtggggggcactgggcttgttggggccagaaatgtccacgtcctgagctttctcctggagcatgtgcagagagtttggcaacgttcgctctcttgaccagaccccttctccctgacctggctcttccagccagggcacgagccctccttctatacctgctccccttcccccagtggggactgagttatgggagaaggggacatatttgtggccaaaatgatactaaccaaaggggcttccttgtcagggcctggtggagttggtgggtcatcggggctcactgcctcctgcccttctctcctgtctgacccccacttagcccttctctccttgcagcctagcagtttatagttctgagatggaaagttgaagggggcaagcaagacctctcctcagcccatgcccagctgtcaggagagaggtgcagggaggaaggccttgtgctgggacaacctctctcttgccttacctcagagagggactatgccctgacccctcctttctgaaaatcagtgccctccctgttgctctaggaggctcctgctggcttggtagaagacagaattcgatctgcctgtccctttttcccctggggtttgacacacaggctcctctcagcatgaggtggagcagtgaccaggtggagcagtgaccaggacgcctctggcccagtgctgcccagcctccccgcccgctcccaggcgccccatgtcctcacaggccaggacgccatggcaggatggagaggacttggtggatttttgtttcttgcctgacctcagtttcatgaaagaaagtggaagctacagaattattttctaaaataaaggctgaattgtctgaaaaaaaaaaaaaaaaa

SEQ ID NO: 111 - DNA, 2327 bp, Homo sapiens
gagcggccgcgccgggtccccgggacggggtggaagtgggggtggggggaggggatcggggccgggccggggccgcgctgcctgcgatgccgggcgcccgccgcagccgctgccgccggagcccgggatggggcgagaggctgcggcggacgccagcatctccccgccggggaccccgggggccgcggagccgccgccgccgctgctgccgccgttgctgagacccagcgggcgatggggatgaagatgagacgctacaagctctttctcatgttctgtatggccggcctgtgcctcatctccttcctgcacttcttcaagaccctgtcctatgtcaccttcccccgagaactggcctccctcagccctaacctggtgtccagctttttctggaacaatgccccggtcacgccccaggccagccccgagccaggaggccctgacctgctgcgtaccccactctactcccactcgcccctgctgcagccgctgccgcccagcaaggcggccgaggagctccaccgggtggacttggtgctgcccgaggacaccaccgagtatttcgtgcgcaccaaggccggcggcgtctgcttcaaacccggcaccaagatgctggagaggccgcccccgggacggccggaggagaagcctgagggggccaacggctcctcggcccggcggccaccccggtacctcctgagcgcccgggagcgcacggggggccgaggcgcccggcgcaagtgggtggagtgcgtgtgcctgcccggctggcacggacccagctgcggcgtgcccactgtggtgcagtactccaacctgcccaccaaggagcggctggtgcccagggaggtgccgcgccgcgtcatcaacgccatcaacgtcaaccacgagttcgacctgctggacgtgcgcttccacgagctgggcgacgtggtggacgcctttgtggtgtgcgagtccaacttcacggcttatggggagccgcggccgctcaagttccgggagatgctgaccaatggcaccttcgagtacatccgccacaaggtgctctatgtcttcctggaccacttcccgcccggcggccggcaggacggctggatcgccgacgactacctgcgcaccttcctcacccaggacggcgtctcgcggctgcgcaacctgcggcccgacgacgtcttcatcattgacgatgcggacgagatcccggcccgtgacggcgtccttttcctcaagctctacgatggctggaccgagcccttcgccttccacatgcgcaagtcgctctacggcttcttctggaagcagccgggcaccctggaggtggtgtcaggctgcacggtggacatgctgcaggcagtgtatgggctggacggcatccgcctgcgccgccgccagtactacaccatgcccaacttcagacagtatgagaaccgcaccggccacatcctggtgcagtggtcgctgggcagccccctgcacttcgccggctggcactgctcctggtgcttcacgcccgagggcatctacttcaagctcgtgtccgcccagaatggcgacttcccacgctggggtgactacgaggacaagcgggacctgaactacatccgcggcctgatccgcaccgggggctggttcgacggcacgcagcaggagtacccgcctgcagaccccagcgagcacatgtatgcgcccaagtacctgctgaagaactacgaccggttccactacctgctggacaacccctaccaggagcccaggagcacggcggcgggcgggtggcgccacaggggtcccgagggaaggccgcccgcccggggcaaactggacgaggcggaagtctagagctgcatgatctgatagggtttgtgacagggcgggggtggcggcggcccctagcgctatctccctgcctcctgccggctccttggttcttgaggggaccaggagtgggtggggagtgggggtgggggtagggtttccctactgaagcccttgtgaatcaagggtcaggcctttgagctcagaaaatatccctcctgttgggagagggcgcaggccgtgacgtctgggtggcccttatgactgccaagactgctgtggccaggaggtgccactggagtgtgcgtggtggtccctgggtagcgggggagggtaggcaggattggggaagagagcctgcaggatctcaccaggcagcctctggggggtggccaggccgggaaaaagcccaccatttggcatccctgggccttgggctccgtgtgggagaccggcctgccaggaggacccagggctctgtaagtagatgcatttgggtccaggaggaa

SEQ ID NO: 112 - DNA, 3592 bp, Homo sapiens
gtgactgaactttgcctgatcatgaccttgatcatgcacagggctgctggtggggtgaggccatcccacgcaactctggggtctgtgaagccaccaaggatcaaggaatggaagagctgcctgagtgtagagggagttcggtcaggcttcttaaacttggagacttggaaacagaaggccttgtaggccacataggttttcagagactcgcctggcagaggcctggagcgtcctgctgcgtggactgtgggcaccgagccaccaggaggttgttgatctcattcttgctcactggtccctgccagactggtggtgcctctctactgtcgggcagccccacctctgtgctgccccatccacctacagccctcatgcctgggcccagctggaggttctgacaggggccccctggggtggcatgcggacccttcagggtgccccaggcgcagcacaggtctccagagacacaggcaccagggcgttcagagctagtcccctcgctgctgttgactgtccttgagcagccccagggccggtttctcaacctcatttgctcacctgagcaatgaagtgaggtgggctcctggaactgcagcagccaccccccggggccatcgtgaggctaagaatccagtgcagggtgagcaaccagcgaccgctacaaggacagtgaagagctagcaccaggaccttgggtagcccacccgctggagggagcgtgtgctgcaaaaagcaagagtgggctttggaggccaacggatggagcggattcagtctgaggctgttccagcccttgcttaggatccacctacctaggtctggaaatcgtatttccacttcagatgccttctcagaggataaaataacccccggtgggggagagtactggaagagggctaattcccctggttttctccccatgagcattagtgtcagtgtaattttagagtgaccccagctatgtcacgtgtggcaggcacaagaacagatgtcaatgagctattgcagaggtggacacccagatgtgtgcgctggcacactggaggggcccgtagggtggctctagaccgccccctcgtgacggcttgcctaccacctgcaggcgacgttgtggacgtttaccagcgggagttcctggcgctgcgcgatcggttgcacgcagctgagcaggagagcctcaagcgctccaaggagctcaacctggtgctggacgagatcaagagggccgtgtcagaaaggcaggcgctgcgagacggagacggcaatcgcacctggggccgcctaacagaggacccccgattgaagccgtggaacggctcacaccggcacgtgctgcacctgcccaccgtcttccatcacctgccacacctgctggccaaggagagcagtctgcagcccgcggtgcgcgtgggccagggccgcaccggagtgtcggtggtgatgggcatcccgagcgtgcggcgcgaggtgcactcgtacctgactgacactctgcactcgctcatctccgagctgagcccgcaggagaaggaggactcggtcatcgtggtgctgatcgccgagactgactcacagtacacttcggcagtgacagagaacatcaaggccttgttccccacggagatccattctgggctcctggaggtcatctcaccctccccccacttctaccctgacttctcccgcctccgagagtcctttggggaccccaaggagagagtcaggtggaggaccaaacagaacctcgattactgcttcctcatgatgtacgcgcagtccaaaggcatctactacgtgcagctggaggatgacatcgtggccaagcccaactacctgagcaccatgaagaactttgcactgcagcagccttcagaggactggatgatcctggagttctcccagctgggcttcattggtaagatgttcaagtcgctggacctgagcctgattgtagagttcattctcatgttctaccgggacaagcccatcgactggctcctggaccatattctgtgggtgaaagtctgcaaccccgagaaggatgcgaagcactgtgaccggcagaaagccaacctgcggatccgcttcaaaccgtccctcttccagcacgtgggcactcactcctcgctggctggcaagatccagaaactgaaggacaaagactttggaaagcaggcgctgcggaaggagcatgtgaacccgccagcagaggtgagcacgagcctgaagacataccagcacttcaccctggagaaagcctacctgcgcgaggacttcttctgggccttcacccctgccgcgggggacttcatccgcttccgcttcttccaacctctaagactggagcggttcttcttccgcagtgggaacatcgagcacccggaggacaagctcttcaacacgtctgtggaggtgctgcccttcgacaaccctcagtcagacaaggaggccctgcaggagggccgcaccgccaccctccggtaccctcggagccccgacggctacctccagatcggctccttctacaagggagtggcagagggagaggtggacccagccttcggccctctggaagcactgcgcctctcgatccagacggactcccctgtgtgggtgattctgagcgagatcttcctgaaaaaggccgactaagctgcgggcttctgagggtaccctgtggccagccctgaagcccacatttctgggggtgtcgtcactgccgtccccggagggccagatacggccccgcccaaagggttctgcctggcgtcgggcttgggccggcctggggtccgccgctggcccggaggccctaggagctggtgctgcccccgcccgccgggccgcggaggaggcaggcggcccccacactgtgcctgaggcccggaaccgttcgcacccggcctgccccagtcaggccgttttagaagagcttttacttgggcgcccgccgtctctggcgcgaacactggaatgcatatactactttatgtgctgtgttttttattcttggatacatttgattttttcacgtaagtccacatatacttctataagagcgtgacttgtaataaagggttaatgaagtgtgtgcctcaaatgtgagcgccctgggcatctccctctgccctgcggttggcttcatttggtctgtgccccaacatgccaactaagcctggcactgggcctccccagccagcatcagcagcgacctttccctgctaagtcaaggagccagcctggcctgcaggcgcggggtccagcccctggctgtgcagctgcagtgccacctcggcgccagcgtaccccccttcctaggatcaggccgcaaagtctgtcactggtgaaaccagctcagaatctgggaccacaatgcctatagcaggtcccccgaatgtctcccccatgtccaaggcctgcgatgaggccttcccttagctcctcaagctgaaggcatttcccagcctccttgttcccctccgtgtgtctcagcttggtcctcatcctgggtccccgacactcctctggcacattagggtctcccgctcacctcagggcctttgcacacactgttgcccctccttggaaagct

SEQ ID NO: 113 - DNA, 2421 bp, Homo sapiens
cagcagaatggaagtgaggaaaggcaaccagctgacacaggagccagagtgagaccagcagactctcacactcaacctacaccatgaatttgtgtctatcttctacgcgttaagagccaaggacaggtgaagttgccagagagcaatggctctcttcactccgtggaagttgtcctctcagaagctgggctttttcctggtgacttttggcttcatttggggtatgatgcttctgcactttaccatccagcagcgaactcagcctgaaagcagctccatgctgcgcgagcagatcctggacctcagcaaaaggtacatcaaggcactggcagaagaaaacaggaatgtggtggatgggccatacgctggagtcatgacagcttatgatctgaagaaaacccttgctgtgttattagataacattttgcagcgcattggcaagttggagtcgaaggtggacaatcttgttgtcaatggcaccggaacaaactcaaccaactccactacagctgttcccagcttggttgcacttgagaaaattaatgtggcagatatcattaacggagctcaagaaaaatgtgtattgcctcctatggacggctaccctcactgtgagggaaagatcaagtggatgaaagacatgtggcgttcagatccctgctacgcagactatggagtggatggatccacctgctctttttttatttacctcagtgaggttgaaaattggtgtcctcatttaccttggagagcaaaaaatccctacgaagaagctgatcataattcattggcggaaattcgtacagattttaatattctctacagtatgatgaaaaagcatgaagaattccggtggatgagactacggatccggcgaatggctgacgcatggatccaagcaatcaagtccctggcagaaaagcagaaccttgaaaagagaaagcggaagaaagtcctcgttcacctgggactcctgaccaaggaatctggatttaagattgcagagacagctttcagtggtggccctcttggtgaattagttcaatggagtgatttaattacatctctgtacttactgggccatgacattaggatttcagcttcactggctgagctcaaggaaatcatgaagaaggttgtaggaaaccgatctggctgcccaactgtaggagacagaattgttgagctcatttacattgatattgtaggacttgctcaattcaagaaaactcttggaccatcctgggttcattaccagtgcatgctccgagtccttgattcatttggtactgaacccgaatttaatcatgcaaattatgcccaatcgaaaggccacaagaccccttggggaaaatggaatctgaaccctcagcagttttataccatgttccctcataccccagacaacagctttctggggtttgtggttgagcagcacctgaactccagtgatatccaccacattaatgaaatcaaaaggcagaaccagtcccttgtgtatggcaaagtggatagcttctggaagaataagaagatctacttggacattattcacacatacatggaagtgcatgcaactgtttatggctccagcacaaagaatattcccagttacgtgaaaaaccatggtatcctcagtggacgggacctgcagttccttcttcgagaaaccaagttgtttgttggacttgggttcccttacgagggcccagctcccctggaagctatcgcaaatggatgtgcttttctgaatcccaagttcaacccacccaaaagcagcaaaaacacagactttttcattggcaagccaactctgagagagctgacatcccagcatccttacgctgaagttttcatcgggcggccacatgtgtggactgttgacctcaacaatcaggaggaagtagaggatgcagtgaaagcaattttaaatcagaagattgagccatacatgccatatgaatttacgtgcgaggggatgctacagagaatcaatgctttcattgaaaaacaggacttctgccatgggcaagtgatgtggccacccctcagcgccctacaggtcaagcttgctgagcccgggcagtcctgcaagcaggtgtgccaggagagccagctcatctgcgagccttctttcttccagcacctcaacaaggacaaggacatgctgaagtacaaggtgacctgccaaagctcagagctggccaaggacatcctggtgccctcctttgaccctaagaataagcactgtgtgtttcaaggtgacctcctgctcttcagctgtgcaggcgcccaccccaggcaccagagggtctgcccctgccgggacttcatcaagggccaggtggctctctgcaaagactgcctatagcagctacctgctcagccctgcaccatgctgctggggaagacagtggcccc

SEQ ID NO: 114 - DNA, 3941 bp, Homo sapiens
tggacgagcgtccgtgcggcctggtccgggccatgtccgcgtgaggaccccgccgctgtcgccgctcccgttccggccctggcccctctgcccggcagcgcggcgcaccatgggctccattctcagccgccgcatcgcgggggtggaggacatcgacatccaggcgaactcggcctatcgctaccctccgaagtccggaaactactttgcttcgcactttttcatgggaggagagaaattcgacaccccccaccctgaaggttacctctttggagagaacatggatctgaacttcctgggcagccgcccggtccagtttccctacgtcactcctgccccccacgagcccgtgaagacgctgcggagcctggtgaacatccgcaaagactccctgcggctggtgaggtacaaagacgatgccgacagccccaccgaggacggcgacaagccccgggtgctctacagcctggagttcaccttcgacgccgatgcccgcgtggccatcaccatctactgccaggcatcggaggagttcctgaacggcagggcagtatacagccccaagagcccctcgctacagtccgagaccgtccactacaagagaggggtgagccagcagttctccctgccctccttcaagattgacttctcggaatggaaggatgacgagctgaactttgacctggaccggggcgtgtttccagtagtcatccaggctgtggtggacgaaggagatgtggtggaagtgactggccacgcccacgtgctcttggctgcctttgaaaagcacatggacggcagcttctctgtgaagcctttaaagcagaagcaaattgtggaccgggtcagctacctcctgcaggagatctatggcattgagaacaagaacaaccaggagaccaagccctcggacgacgagaacagcgacaacagcaacgagtgtgtggtgtgcctgtccgacctgcgggacacgctgatcctgccctgccgccacctgtgcctctgtacctcctgcgccgacacgctgcgctaccaggccaacaactgccccatctgccggctgcctttccgggccctcctgcagatccgggcggtgcggaagaagccaggagccctgtcccccgtgtccttcagccccgtcctggcccagagcctggagcatgatgagcactcttgtccctttaaaaaatcaaagccgcaccccgcctccctggccagcaagaaacctaaaagggaaacaaactctgacagcgtcccacctggctacgagcccatctcgctgctcgaggcgctcaacggcctccgggctgtctccccggccatcccctcggcccctctttatgaagaaatcacctattcaggcatctcggacggcctgtcccaggccagctgtcccctcgcggctatcgaccacatcctggacagcagccgccagaagggcaggccgcagagcaaggcccccgacagcaccctacggtccccgtcttcccccatccacgaagaggatgaggagaagctctccgaggacgtggacgcccctcccccactgggtggcgcagagctggccctgcgggaaagcagctcccctgagagtttcataacagaagaggttgatgagtcgtcgtcaccacagcaagggacccgagcagcttccattgagaatgtcctgcaggacagcagccccgagcactgtggccgaggcccacctgctgacatctacctgccaggacggcccacctccatggagacggcccacggcctcgccaccaccagccccacctggcctccacttggtggccccagccccgatcccagcgccgccgagctgaccccactctgagagcctggccgagctggcagcatggagccctcggctccccagactttgccgaggggctgctccggaccccgttgtgagccggcctcctgtctgcatgccccctgtggccaccaggctccgaggggccgtggtgactcttgatcaaagagcacagtgaactgtcccttctgagtctcccttttctacagttgatatatttgtaactggtacaagatgaaggacagcagctttccatccctagttcagagcccccgttccccagggtcctgtgggctgagcggctggggctggggctgcccacgtgtggcctccgctggctctgcctgctcctgcaacagtgcggtccctgcccggagaactcaggaggcctgcagaagagaactgattggtggtcgaagcaccatcttcacagatgttcaggggcagtggggggctccaggcacggtcaatgaaggaaacagtgcctgtccacccaccctgcgtgtcactgtggcggcctggctgtcgctgctttttgtcctctgacgtgtttgcgcggcctcagtgccctccctggtgcgtctgcgctggggccctcagtgctcggggccttggggtgcatgggcgccgccctgggcagctagagtgtctcagcccggtgctgggcctggccgaggggcggaggcacagctgcttccagcagccagcattcagtggccttgtcaccaagctccacacctcctcctggtgctggctttggtgacatcacaaggcccctccaggtgcaggggcttctgtttggcaggcccctgccagggaggacctggtggcctcctcattctcttttgccattggaatgtccccttgcagttctcttctctttttttttttttgagatggagtttcactcttgctgcccaggctggagtgcagtggctcaatctcgggtcactgcaacctccgcctcccgggttcaagtgatcgtcctgccttaggctcctgagtagctggggattacaggtgcctaccagcatgctcggctaatttttttgtatttttagtagagaagggatttcaccatgttggccgggctggtctcaaactcctaaggtcatccacctgcctcggcctcccagagtgctgagattacaggcgtgagcctccgcgcccggcccccttgcagttctctctgatttggtttgttctgtctcaggcttctgtggcaggactggcccagggaggaggaagccagcagcacacctggggaatggggtcccggccgggaggcttggcctctgggcgacctcgtcctgttttgtttgtttgtttgtttgtttttttaaaggtaaacctcctgggccgcagatggcaaagggagtgcctgggcctggtgacccagggctggatccacccctgcggagccctgggccaggcaggtgtctgctgctcacctggctctggagggctgccctgcagctgggcctggggacaggtcggctgtggggcagctcagtaccctccctgaggctcacggtggctccgagcatgagctctgcctcctgggcgagacccagcagtggacagcacggtcctcacacccagctccctgcacacccaggccagccacccctcccgctcgtgcacaggcacgcagatgcgctcacacgtacacacacacaaatgcacgcccacttgcacatgctcacgcacacgttcacacatgcacactcacgctcacacatgctgtcacgcatacacacacgcacatactcctgcacatgttcccatgcatgtgtgtgcactcggaccgagcatctcccacgcacctctaccccaccccaagcacctctctccccccatgcacctctccccaacaacacacacagccccctgcaccgcccgccccccgcccccaccaaggccccagcctctggccatcagtcctggtgccagagctttgcgtgaagttcgggccgcagagtggcccgctgggactcccatgtgctgccgtctgatgtgctcagatgggctcatcgttggttcgtttttactgtatatttatagtaataaaatcatgcagcaaaaaaaaaaaaaaaaaaaaaaaaaaaaaaaaaaaaaaaaa

SEQ ID NO: 115 - DNA, 1170 bp, Homo sapiens
agagtagaggcggcggcggcggcggccggacccagactggtagtgaggctttggaccccgagccgctgcaatgccgctggagctggagctgtgtcccgggcgctgggtgggcgggcaacacccgtgcttcatcattgccgagatcggccagaaccaccagggcgacctggacgtagccaagcgcatgatccgcatggccaaggagtgtggggctgattgtgctaagttccagaagagtgagctagaattcaagtttaatcggaaagccttggagaggccatacacctcgaagcattcctgggggaagacgtacggggagcacaaacgacatctggagttcagccatgaccagtacagggagctgcagaggtacgccgaggaggttgggatcttcttcactgcctctggcatggatgagatggcagttgaattcctgcatgaactgaatgttccatttttcaaagttggatctggagacactaataattttccttatctggaaaagacagccaaaaaaggtcgcccaatggtgatctccagtgggatgcagtcaatggacaccatgaagcaagtttatcagatcgtgaagcccctcaaccccaacttctgcttcttgcagtgtaccagcgcatacccgctccagcctgaggacgtcaacctgcgggtcatctcggaatatcagaagctctttcctgacattcccatagggtattctgggcatgaaacaggcatagcgatatctgtggccgcagtggctctgggggccaaggtgttggaacgtcacataactttggacaagacctggaaggggagtgaccactcggcctcgctggagcctggagaactggccgagctggtgcggtcagtgcgtcttgtggagcgtgccctgggctccccaaccaagcagctgctgccctgtgagatggcctgcaatgagaagctgggcaagtctgtggtggccaaagtgaaaattccggaaggcaccattctaacaatggacatgctcaccgtgaaggtgggtgagcccaaaggctatcctcctgaagacatctttaatctagtgggcaagaaggtcctggtcactgttgaagaggatgacaccatcatggaagaattggtagataatcatggcaaaaaaatcaagtcttaaaaataaagtgccattctctg

SEQ ID NO: 116 - DNA, 7913 bp, Homo sapiens
ccttagccccgtgggccccacggagtgagcggcatgcagcacccccgggcctgtccagtgtcctctggcctgctgccctgcacccccagaaggccctgacgccctggggcacttctgctctgcacaggaccacgcgggggtttgccatggtgacataaaggggcgcggaggaaggaaggagcgtgaccagcctgtggactgcgcccctggctgggaggaaggactgggggcccagatcctccactcccagtgccccacaagggcgtcgcttcctaagtctctgtgaatttgttggtcagtggacgattctcgtgtctcctcctgtgtggggccttggggtagccagggcaggccgggcctccggtggccaaggtctcggaggccaggatgcctgccctggcatgcctccggaggctgtgtcggcacgtgtccccgcaggctgtccttttcctgctgttcatcttctgcctgttcagcgttttcatctcggcctactacctatatggctggaagcgaggcctggagccctcggcggatgcccccgagcctgactgcggggacccgccgcctgtggcccccagtcgcctgctgccactcaagcctgtgcaggcagccaccccttcccgcacagacccgttggtgctggtctttgtggagagcctctactcgcaactgggccaggaggtggtggccatcctggagtccagccgcttcaaataccgcacagagattgcgccgggcaagggtgacatgcccacgctcactgacaagggccgtggccgcttcgccctcatcatctatgagaacatcctcaagtatgtcaacctggacgcctggaaccgggagctgctggacaagtactgtgtggcctacggcgtgggcatcattggcttcttcaaggccaatgagaacagcctgctgagtgcgcagctcaagggcttccccctgttcctgcactcaaacctgggcctgaaggactgcagcatcaaccccaagtccccgctgctctacgtgacgcgacctagcgaggtggagaaaggtgtgctccccggcgaggactggacggttttccagtcaaatcactccacctatgagccagtgctgctggccaagacgcgctcgtctgagtccatcccacacctgggcgcagacgccggcctgcatgctgcactgcacgccactgtggtccaggacctgggcctgcacgacggcatccagcgcgtgctgtttggcaacaacctgaacttctggctgcacaagcttgtcttcgtggatgccgtggccttcctcacggggaagcgcctctccctgccattggaccgctacatcctggtggacattgatgacatcttcgtgggcaaggagggcacacgcatgaaggtggaggacgtgaaggccctgtttgacacacagaacgaactacgcgcacacatcccaaacttcaccttcaacctgggctactcagggaaattcttccacacaggtaccaatgctgaggacgctggggatgatctgctgctgtcgtatgtgaaggagttctggtggttcccccacatgtggagccacatgcagccccaccttttccacaaccagtccgtgttggccgagcagatggccttgaacaagaagttcgctgtcgagcatggcattcccacagacatggggtatgcagtggcgccccaccactcgggcgtgtaccccgtgcacgtgcagctgtacgaggcttggaagcaggtgtggagcatccgcgtgaccagcacggaggagtacccccacctgaagccagcccgctaccgccgtggcttcatccacaatggcatcatggttctcccacggcagacctgcggcctcttcacacacaccatcttctacaacgagtaccctggcggctccagtgagctggacaagatcatcaacgggggcgagctcttcctcaccgtgctcctcaatcctatcagcatcttcatgacgcacctgtccaactatgggaatgaccgcctgggcctgtacaccttcaagcacctggtgcgcttcctgcactcctggacgaacctccggctgcagacactgccccctgtgcagttggcgcagaagtacttccagatcttctccgaggagaaggacccgctctggcaggacccctgcgaggacaaacgtcacaaagacatctggtccaaggagaagacgtgtgaccgcttcccaaagctcctcatcatcggcccccagaaaacaggcaccactgccctctacctgttcctgggcatgcaccctgacctaagcagcaactaccccagctctgagacctttgaggagatccagttttttaatggccacaactatcacaaaggcatcgactggtacatggagttcttccccatcccttccaacaccacctccgacttctactttgagaaaagcgccaactactttgattcagaagtggcgccccggcgggcagcagccctcttgcccaaagccaaggtcctgaccatcctcatcaaccccgcggaccgggcctattcctggtaccagcaccagcgagcccatgacgacccagtggccctaaagtacaccttccatgaggtgattaccgccggctctgacgcatcctcgaagctgcgtgccctccagaaccgctgcctggtccctggctggtacgccacccacatcgagcgctggctcagtgcctatcacgccaaccagattctggtcttggatggcaaactgcttcgcacagaacctgccaaagtgatggacatggtgcagaagttccttggggtgaccaacaccattgactaccacaaaaccttggcgtttgatccaaagaaaggattttggtgccaactgcttgaaggaggaaaaaccaagtgtctgggcaaaagcaagggccggaaatatcccgagatggacttggattcccgagccttcctgaaggactattaccgggaccacaacatcgagctctccaagctgctgtataagatgggccagacacttcccacttggctacgagaggacctccagaacaccaggtagccgtggccaccacagccagactgaacgtttgtgaaagctgggacatcccaccacacgctgagccagacctgcagagtgggaagctggaccagggcagctgcgcacttatgagcaatactctgtggaggtctggtggggctgggggagcacccaggcggatctgcaagcacctcggagcacccaccgctgggtctgcggcctaagggacctccctcgccagcagaggtccattccgttcccagctgctcctggggaggccgcttcctggtaggagggagtccacgagactcttttctgtccctcactgtgttccgccgactgtcccctctcgtcacccatcactccctgcttccgcagggcgcccctcagtattcgctgccatatgtccctgtcctccaggctgtaggggaggagagcctggccgggggagacagactggacatttccctgtttcgagccaggctcttccaaggggccagctgggtccccggagtcagtcctaggctggatgggagggtggccccctcaagaggactcccagcctccacatctggttcctaccttcacatctcaccctcccgttctggggaagaatttctggttcctacagtatccactccatcctcaaggcttcccgcagggccttggggcactgccttgccatcgggcccagttctccgggccccacctgcacccctttcttccccctgggatatgatgtgtggtgtttcctgtggtaaaagactgaggcaggccaggggtctgccagtaacatgttcccatgtacagacacggtccccacaccctcccagcctcaggcccaggcagacatgggcgagctggtgagactgccagccacggctttgcttagccacctgtggccgagggctctcagagacccccttaacctcccaaatactaagaagctaaaatattttaatattttgtttttttttttcttggtgccagagtttataccctgggtgctggggtcgcactgtgttatatatatatatatatatatataatgtgtatatatatatattctattttttttggttgggttcgtttttaattcagtcctacaaaatggtggtaagccccagtctcaggggtcaccctgtcttagagctagagatgaggtggcagggagggaggctgtgtcctcagtggcctggggctgagcagaccttaggaagggaccctccccagtgccgtggctgctctggggctaccccaggtgaacagaggtggtgagatgcgcagggaagaccagctctctccaggacatcgggctgcgtgaagtccagtgaccctgaggggattttggccaaaggaaacagccagggctgggctaggagagctagggtcaaaagctgccccacccactctccctcacatggtgctaggctgggagctgccctgagagctgggatgcccaccaaggcccacagaactgtctccaggcccttgtagacagtgggatctctgggctgatttctggttggggtctgctcctaccccaccccatttaacaatgtgaagtgactgaggctggggtgcctctccctggccccctccaactgccaaattctgcttccctctgaaccccaggaaatactttctggagaggcttgtcttgttcagaagactctagcatcttggggctggaaggtcctttgacgggtatgaaacaggtccagaaaggggaggtggcctgcttggccgacgtcatggagccagctgggagcagggctgagcgttgaacccgaggctcccggttccaagtcccatcgtgctcctcttccaatgccacactgcctctgagcccatccttggaccctactctgtgccaggttcctgtcccttcctccgtcacagcatggtcattccaggatatgggacaaaccactccttcccagccagggtgcctttgagccttctcattccgaggtctgcgtttgcatccctgtcgtgttctccctcgaggggtccttccccagcctgtgggggcctgggtctgttctgagctgattcccttttctccagttctctgctgggatgaagaaagttggacactcagtgggaccagctgcaggtggtttcactgtgtacacagcagtgtccccatcatgcctctcaatggggcctgcaagcctgggaacttgggcatcgttgggccagcaggatgagcagcaaagagtctgaggacagggtggcatgtctgcttgtgtgctcatgaagacatgcccacgccatggagccaggggcttacagagaggggcagtgacttccagagtcccatccgtcagtgaggggactgggctgcgggatgggtgaggatcttacagctcccaggttcggaaatctaccctctaggcctggaggcctctctcgcagagcatggaaggcaggagaggtgggctggcctagggcaggagctccacttctctctgcctctggctatgggaaggagcaggcggttggaaatcctgtgacaacagagatcttctggatttttgcctggacccttctgcaagcctggagactggacctgccacatgttccaagtctgtctgcctaggtcactgctgccacttctcctcccactaacagacctttcttgaagacccactaggtccagacactgccgggacttgcaggtatggggggtagaaggagaggcagataagctgcctggggggctgttagctaatgggtacaaggacaccccctcccgagaagagaagccacagatgagtgggccagcgaggccagtcttcaatgtccactaattcactctaagcatttggccaaaaaaaggagagagaaataactgaaattgttcaggtggctccatcgtctattctgtggtcccctccatgagcctttgccccagggtgggtgcaggtgcgagtgtcacctgcagctgcctcagtcattcagagttccagagccttctgtggtggagcatcctgctgcttggaggatgagtctgaagtttaaaaatgggccttttctgagcccccctgatgagcagtcagtgcttctgggcccagctaaggaagccatctgttcccagcagaggagagctgctgcgctgacctgcagaggttggtggtcccagcacagagctgtgcccatgggcttgttagtgggaaaagcaaatacaacaatgttttaccaaacatttaattatgaatgcccactccccagcatctagatctaaaattattaacattttgccacattctttttctctctctgtgtatgtatatgttttctctgtcctaatttaaaagtacattgcaaacatcatgaaacttgatccctgaaagcttcagcctgcatctcctaagagttagggcattgtcctacacgttggcccagtatcacagccaagacgagaagtcatttcccagcgatgtctgctatctaatctgtattcaaatccccccaattgtctcccaggtaacttatgtgtctggttttggaatcagcatccagtcacggtgcacacattgcattttctaactatgtttttaaaacctctttgaatgctgaaaggtcttccctcagctcactttgagtttttaaatgacattgtttttgaggccctaggcctgctgtctttttgaagccccacattctgaatttgtcagattgtttgctcatggtgtcgcataaccacttcttctatcccctgtactttcaaggataatttaggctacatgagattttgccttttgtgctgacttgacagcttcacttctgcctaagatgcgcctccactgtcacctgtaccaagtgccaaaacagcagaggggccagttagagcaagagctctgggggggccggaaagtctccctggagaaggccgtaatatctgggccttggaaggaaggacacagggctctggaaggaggaggctgcatgcctgaaggctgggccttcgaccctggggatgggccacagggcaccaaacacatcatatgtctctctctttctattttggggtcccagggttttcatttcctggagacccgtggtctgtgtgcactggagcagagccaggctctcagttgcagcagggaaaagcctacatggggaactgcctcccgcaagctgtggtgtgagaagagccctggctggcagcaggagctgtgaagtttcatcccagccgggtgcatttagtagctgcctgaccatcttcctcccaggccctcagtttcttcatctgtagaatgagcagataggggccacagcagggattttcacacatcaaaggaggcagcctctgctctagttgatgtgaggatgagggggcggcctagaccccctgctgcccaggccgttgaggcaacactgggttcctggcttgacagctgtgggctggctgcccttgccagctcagacggctggcgagttttcagcttccctaagggactggcatagggttttgtggggtcaatgccaggaacctgggggaaactggatgcgttttatcctaagaagttcatccctcctgctcttactgtttccggccctggaggagaatgagggaggagagggttttctatgactgtgttagcttttattattagcaagagggctccttttgtaatttgtgcatgaaattcatgtcatttcctgggagaggagagggccgactggagagggtggggggcacactggggaagcaggcagaggtttccttcccttgtaggggggtggggggagtggggagagggggggctatccagttcgcctgatgagggctctcgaaccagccgttttgggttgtgttaaaggtgagaccttcctccattaatgtacaatctcgaactaactgctaataaagtggggttctgtttgta

SEQ ID NO: 117 - DNA, 1943 bp, Homo sapiens
cgggaagcgcggcggggcctccagaccggggcgggcttaagggtgacatctgcgctttaaagggtccgggtcagctgactcccgactctgtggagtctagctgccagggtcgcggcagctgcggggagagatgactggggagcgacccagcacggcgctcccggacagacgctgggggccgcggattctgggcttctggggaggctgtagggtttgggtgtttgccgcgatcttcctgctgctgtctctggcagcctcctggtccaaggctgagaacgacttcggtctggtgcagccgctggtgaccatggagcaactgctgtgggtgagcgggagacagatcggctcagtggacaccttccgcatcccgctcatcacagccactccgcggggcactcttctcgcctttgctgaggcgaggaaaatgtcctcatccgatgagggggccaagttcatcgccctgcggaggtccatggaccagggcagcacatggtctcctacagcgttcattgtcaatgatggggatgtccccgatgggctgaaccttggggcagtagtgagcgatgttgagacaggagtagtatttcttttctactccctttgtgctcacaaggccggctgccaggtggcctctaccatgttggtatggagcaaggatgatggtgtttcctggagcacaccccggaatctctccctggatattggcactgaagtgtttgcccctggaccgggctctggtattcagaaacagcgggagccacggaagggccgcctcatcgtgtgtggccatgggacgctggagcgggacggagtcttctgtctcctcagcgatgatcatggtgcctcctggcgctacggaagtggggtcagcggcatcccctacggtcagcccaagcaggaaaatgatttcaatcctgatgaatgccagccctatgagctcccagatggctcagtcgtcatcaatgcccgaaaccagaacaactaccactgccactgccgaattgtcctccgcagctatgatgcctgtgatacactaaggccccgtgatgtgaccttcgaccctgagctcgtggaccctgtggtagctgcaggagctgtagtcaccagctccggcattgtcttcttctccaacccagcacatccagagttccgagtgaacctgaccctgcgatggagcttcagcaatggtacctcatggcggaaagagacagtccagctatggccaggccccagtggctattcatccctggcaaccctggagggcagcatggatggagaggagcaggccccccagctctacgtcctgtatgagaaaggccggaaccactacacagagagcatctccgtggccaaaatcagtgtctatgggacactctgagctgtgccactgccacaggggtattctgccttcaggactctgccttcaggaacacgggtctgtagagggtctgctggagacgcctgaaagacagttccatcttcctttagactccagccttggcaaaatcaccttccctttaccagggaaatcacttcctttaggactgaaagctaggcgtcctctcccacaaaaaagtcctgccctcatctgagaatactgtctttccatatggctaagtgtggccccaccaccctctctgccctcccgggacattgattggtcctgtcttgggcaggtctagtgagctgtagaattgaatcaatgtgaactcagggaactggggaaggctgagcctcctctttggtgttgcggtaagataaccgacagggctggtgaaagtccccagatggcaggatatttggtttcagagtaaggactaggtgcaccaccatgactgactatcaatcaaaatgtttgtaacttaaaatttttaatgaaggataatgaatatttgtagagtctctatggttctgtcaatgcaaaaaaaaaaaaaaaaaaaaaa

SEQ ID NO: 118 - DNA, 1143 bp, Homo sapiens
atggcgtcccttcctgtcctgcagaaggagagcgtgttccagtcgggagcccatgcctacagaatccctgccctgctctacctgcctgggcagcagtccctgctggccttcgcggaacagcgggcaagcaagaaggatgagcacgcagagctgattgtcctgcgcagaggagactacgacgcacccacccaccaggttcagtggcaagctcaggaggtggtggcccaggcccggctggatggccaccggtccatgaacccatgccccttgtatgacgcgcagacggggaccctcttcctcttcttcattgccatccctgggcaagtcacggagcaacagcagctgcagaccagggccaatgtgacgcggctgtgccaagtcaccagcactgaccacgggaggacctggagctcccccagagacctcactgatgcggccatcggcccagcctaccgggagtggtccacctttgcagtgggcccggggcattgtttgcagcttaacgacagggcccggagcctggtggtgcccgcctacgcctaccggaaacttcaccccatccaaaggccgatcccctctgccttctgcttcctcagccatgaccatgggcgcacgtgggcgcgagggcactttgtggcccaggacaccctggagtgccaggtggccgaagtcgagactggggagcagagggtggtgaccctcaacgcgagaagccacctccgagccagggtccaggcccagagcaccaatgacgggcttgatttccaggagtctcagctggtgaagaagctggtggagccgccgccccagggctgccaggggagcgtcatcagcttccccagcccccgctcggggcctggctccccagcccagtggctgctctacactcaccccacacactcctggcagagggccgacctgggtgcctacctcaacccgcgacctccagcccctgaggcctggtcagagccggtactgctggccaagggcagctgtgcctactcagacctccagagcatgggcaccggccctgatgggtcccccttgtttgggtgtctgtacgaagccaatgattacgaggagattgtctttctcatgttcaccctgaagcaagccttcccagctgagtacctgcctcagtga

SEQ ID NO: 119 - DNA, 2748 bp, Homo sapiens
cttttcgttgccgttacctgtttccggcagtcgacacgctcttcgcttctcggggcttgtctccgtgtcctccgtctcagttgtttctccctctctatcctcctctgtctcagtctccccagccttggggccggtgcctcttccgggcttcggcgaatgagacctgcggacctgcccccgcgccccatggaagaatccccggcgtccagctctgccccgacagagacggaggagccggggtccagtgcagaggtcatggaagaagtgacaacatgctccttcaacagccctctgttccggcaggaagatgacagagggattacctaccggatcccagccctgctctacataccccccacccacaccttcctggcctttgcagagaagcgttctacgaggagagatgaggatgctctccacctggtgctgaggcgagggttgaggattgggcagttggtacagtgggggcccctgaagccactgatggaagccacactaccggggcatcggaccatgaacccctgtcctgtatgggagcagaagagtggttgtgtgttcctgttcttcatctgtgtgcggggccatgtcacagagcgtcaacagattgtgtcaggcaggaatgctgcccgcctttgcttcatctacagtcaggatgctggatgttcatggagtgaggtgagggacttgactgaggaggtcattggctcagagctgaagcactgggccacatttgctgtgggcccaggtcatggcatccagctgcagtcagggagactggtcatccctgcgtatacctactacatcccttcctggttcttttgcttccagctaccatgtaaaaccaggcctcattctctgatgatctacagtgatgacctaggggtcacatggcaccatggtagactcattaggcccatggttacagtagaatgtgaagtggcagaggtgactgggagggctggccaccctgtgctatattgcagtgcccggacaccaaacaggtgccgggcagaggcgctcagcactgaccatggtgaaggctttcagagactggccctgagtcgacagctctgtgagcccccacatggttgccaagggagtgtggtaagtttccggcccctggagatcccacataggtgccaggactctagcagcaaagatgcacccaccattcagcagagctctccaggcagttcactgaggctggaggaggaagctggaacaccgtcagaatcatggctcttgtactcacacccaaccagtaggaaacagagggttgacctaggtatctatctcaaccagacccccttggaggctgcctgctggtcccgcccctggatcttgcactgtgggccctgtggctactctgatctggctgctctggaggaggagggcttgtttgggtgtttgtttgaatgtgggaccaagcaagagtgtgagcagattgccttccgcctgtttacacaccgggagatcctgagtcacctgcagggggactgcaccagccctggtaggaacccaagccaattcaaaagcaattaattggcttaggacccaatttccatagatgcaaatggcagttacagacaggttaacagaagctactgaagtctacagataatcaaaaaacttaatattctgttccctaccttttttcacttttcctcctccaaagagcaaaatgaaaattttgccttagctactgcagtggaaagagcactgaactaggagttggaagacaaggatgtggtcctggctctgccactggcttgcttttggaccttggatgtgtcacctgaactctctggacctcaggtttccatctgtaaaatgagagtattggttctaagatttctcatcttctcatccctaggacaagcatagtgcctgcatgcttcatgatcagtaagtcctggctgcataaaggactctgatgtcaaaatggaaaccaggggacttaccttttcacatgacttacccctcatccgagtgtgaggttacaagcaggtgtcatggcaggaaggaagaccagatctgtatgatttgttccatttttaataacaaaaatatccacacccttttaataatgctcagttctgtaggctctctatcctagaggaattgagcaaaacagaagaatcatgaagtctcctaccttctacagccttgtagttctgcttaccttctcttcctcatccagaaagcatcattttctagggagaacaatgagaatctcaatgccagtagtactggataatagtgcgtattgcttctggtggcattaccctgatgatgggctgaagttcatttattagggtggttcctgatgggaaaaggacatggattaggactttaaaacactggacagaatttcccacagtctttgccctcaaggagttcaccagtttatggggctagaagagcgagaaaattcaagaaaataaatgtagctggtgggagactttgtagatgttgggctatatgttggggtgatggtagctcctgatgtaattttcttagttgcatcttcaatatgcctggagtcgtctgtccaaggcttgtccaggcttctgggtttctctcaagtttgtttttctcaggatattgtcctggcccagctactcctttacctgtgagaagatcttcaccattaggaagatctctagacccccagatctcagaatcaggcctatttgtgtaggcccatggaaatcactacttgtgaagtagagatgcctttttgtctaa

SEQ ID NO: 120 - DNA, 2276 bp, Homo sapiens
gaacgtggtataaaaggggcgggaggccaggctcgtgccgttttgcagacgccaccgccgaggaaaaccgtgtactattagccatggtcaaccccaccgtgttcttcgacattgccgtcgacggcgagcccttgggccgcgtctcctttgagctgtttgcagacaaggtcccaaagacagcagaaaattttcgtgctctgagcactggagagaaaggatttggttataagggttcctgctttcacagaattattccagggtttatgtgtcagggtggtgacttcacacgccataatggcactggtggcaagtccatctatggggagaaatttgaagatgagaacttcatcctaaagcatacgggtcctggcatcttgtccatggcaaatgctggacccaacacaaatggttcccagtttttcatctgcactgccaagactgagtggttggatggcaagcatgtggtgtttggcaaagtgaaagaaggcatgaatattgtggaggccatggagcgctttgggtccaggaatggcaagaccagcaagaagatcaccattgctgactgtggacaactcgaataagtttgacttgtgttttatcttaaccaccagatcattccttctgtagctcaggagagcacccctccaccccatttgctcgcagtatcctagaatctttgtgctctcgctgcagttccctttgggttccatgttttccttgttccctcccatgcctagctggattgcagagttaagtttatgattatgaaataaaaactaaataacaattgtcctcgtttgagttaagagtgttgatgtaggctttattttaagcagtaatgggttacttctgaaacatcacttgtttgcttaattctacacagtacttagattttttttactttccagtcccaggaagtgtcaatgtttgttgagtggaatattgaaaatgtaggcagcaactgggcatggtggctcactgtctgtaatgtattacctgaggcagaagaccacctgagggtaggagtcaagatcagcctgggcaacatagtgagacgctgtctctacaaaaaataattagcctggcctggtggtgcatgcctagtcctagctgatctggaggctgacgtgggaggattgcttgagcctagagtgagctattatcatgccactgtacagcctgggtgttcacagatcttgtgtctcaaaggtaggcagaggcaggaaaagcaaggagccagaattaagaggttgggtcagtctgcagtgagttcatgcatttagaggtgttcttcaagatgactaatgtcaaaaattgagacatctgttgcggttttttttttttttttttcccctggaatgcagtggcgtgatctcagctcactgcagcctccgcctcctgggttcaagtgattctagtgcctcagcctcctgagtagctgggataatgggcgtgtgccaccatgcccagctaatttttgtatttttagtatagatggggtttcatcattttgaccaggctggtctcaaactcttgacctcagctgatgcgcctgccttggcctcccaaactgctgagattacagatgtgagccaccgcaccctacctcattttctgtaacaaagctaagcttgaacactgttgatgttcttgagggaagcatattgggctttaggctgtaggtcaagtttatacatcttaattatggtggaattcctatgtagagtctaaaaagccaggtacttggtgctacagtcagtctccctgcagagggttaaggcgcagactacctgcagtgaggaggtactgcttgtagcatatagagcctctccctagctttggttatggaggctttgaggttttgcaaacctgaccaatttaagccataagatctggtcaaagggatacccttcccactaaggacttggtttctcaggaaattatatgtacagtgcttgctggcagttagatgtcaggacaatctaagctgagaaaaccccttctctgcccaccttaacagacctctagggttcttaacccagcaatcaagtttgcctatcctagaggtggcggatttgatcatttggtgtgttgggcaatttttgttttactgtctggttccttctgcgtgaattaccaccaccaccacttgtgcatctcagtcttgtgtgttgtctggttacgtattccctgggtgataccattcaatgtcttaatgtacttgtggctcagacctgagtgcaaggtggaaataaacatcaaacatcttttcatta

SEQ ID NO: 121 - DNA, 2940 bp, Homo sapiens
gcggcccttctcccctcccctctcagttccctccgccctcctcgggctccagcggtggcggagcgaacgggaccggcccggcttcagagcgcgaggtggagggtggaacgcgggcgcctgaaggagttgttgtctcggcagcgcccgcggagacgtgaagaggtggttgtgggaagagaagtttgcagaactgaaatggaggtcagagcttcattacagaaggttagtggatcatctgattctgtggctacaatgaacagtgaagaatttgttttggttcctcagtatgcagatgataattctacaaaacatgaagaaaaacctcaactgaagatagtttctaatggtgatgaacaattggaaaaagccatggaagagattttgagagattccgagaaaaggccaagcagtcttcttgttgattgtcaaagttccagtgagatttcagaccattcgtttggagatattccagccagccaaacaaataagccatctcttcagttaattttggatccgtctaacacagaaatttctacacccagaccatcttctccaggtggactacctgaagaagatagtgttttatttaataaactgacctacttaggatgtatgaaggtttcttccccacgtaatgaagtagaggctttacgggcaatggcaaccatgaaatcttccagtcaatacccctttcctgttaccctgtatgtaccaaatgttccagaaggttctgtgagaattatagaccaatccagcaatgtggagatagcatcttttccaatctataaggtgttattctgtgcacgtggacatgacggaacaacagagagcaattgctttgcatttacagagagttcccatggttcggaagaatttcagatacatgttttctcctgtgaaattaaagaggcagtaagcagaattttgtacagtttctgtacagcattcaaacgttcttccagacaagtgtctgatgttaaagactcagttattcctacccccgacagtgatgtgtttaccttcagtgtctccttggaggtaaaagaagacgatggaaaaggaaactttagccctgtgcctaaggatagagataaattttatttcaaattaaagcaaggaatagagaagaaggttgtgattacagtgcagcaactttctaacaaagaattagctattgaaagatgttttggaatgttattaagcccaggtcgaaacgtgaagaacagtgacatgcatttactggatatggaatccatgggaaagagctatgatgggagagcttatgtcatcactggcatgtggaaccccaatgcaccagtatttctggcacttaacgaggaaaccccaaaagataagcaagtatacatgactgtggcagtggatatggtagtcacagaggtggtggagcctgttcgctttctcctggagacagtagtccgtgtgtaccctgcaaatgagcgattttggtatttcagcagaaagactttcacagagactttcttcatgagattgaaacagtctgagggaaaaggccataccaatgctggagatgcaatatatgaggtggtgagtctacagcgagagtctgacaaggaggaaccagtcactcctactagtggagggggtccaatgtcaccccaggatgatgaagcagaagaggagagtgataatgaactctcaagtggaacaggtgatgtgtctaaggattgtcctgagaagatcctgtattcttggggagagttgctaggaaaatggcacagtaaccttggtgcacgaccgaaagggctgtctactctggtgaagagtggtgtccctgaagcattgagggcagaggtatggcagttattggcaggctgccatgacaaccaggcaatgctggatagataccgaattcttatcacaaaggactcagcccaggagagtgttattactcgagatattcatcgtacatttcccgcacatgattactttaaagatactggaggagatggtcaagaatcgctctataagatctgcaaggcctactctgtgtatgatgaagacattgggtactgtcaagggcagtcttttcttgctgctgtattactgctgcatatgccagaggaacaagcattctgtgttttggtgaaaatcatgtacgactatggtttgagagacctctacagaaacaacttcgaagatcttcattgcaaattctaccagttggagagactaatgcaggaacagctaccggacctgcatagccatttttctgatctgaacctggaagctcatatgtatgcatcccagtggtttctcactctttttactgccaagttcccactctgcatggtgttccacatcattgacttactgctttgtgagggtttgaacataatctttcatgtagctttggctctcctaaagacctcaaaggaagaccttctgcaggctgattttgaaggtgctttaaagttctttagagttcagcttccaaagagatacagggcagaggaaaatgcaagaagactgatggagcaggcttgcaatattaaagtaccaaccaagaagctgaagaaatatgagaaagaatatcagacaatgcgagagagtcagctgcaacaggaagacccaatggatagatacaagtttgtatatttgtaggtaactccagctgttgcatttatactgggaatcttcataagaagctgagagaaagagaggggaaaaagaaagtggctttctactttcaaaaatgaaacaaaaaggaaaaatggcaaagtactgttttagctgtgcatgtcatatccacaaagacttttagcaggtgaactgttccaagactgacacaaggatgtttcaaacttgcctctgtctgtagaaaatgttaaaaataccaactcacttggaaggaaaaataaaaatcacaaaggtatattgagcacagtaaaaaaaaaaaaa

SEQ ID NO: 122 - DNA, 8207 bp, Homo sapiens
agacgctcgcgagcaaccctccgcgctccggagcctcctcagcctcccgcacaccccgagacgctcgccccgctgggcctcggtccccgcctcctcccccgtccttttcccctctctcgctccccacattgtctctgcctcattttctctcctagttgaggattaaaaaaaaaaaaaaatcaccatcatcctcagggagccccctcgccctcggaaaacaaaaccagacatgatcctgggctcctgcttctgaaagatctgcccgaccgaggaggagggagcctaggttcaagtcgcaggaaaggtcacggcagggaagccccctcagcccctccgcgtcgcctccccgcgggccgcccctctcggccctgcgccccgcggccccgcagcctccgcgcggcctcccgccccatccccgccactttccccggagctgggccgcgaacacctcactattgatggtgtagcgctttaggggaaggaggtgattgtctaggagtaactgtatgtgcgctcagcaccgggtcacaaccaccgtgggatccacttacagagaagatttgtggagagcttcagcctgtttatggtgttactgagaaaggaattgtggccatttgatataattctggatggaagacctcttatttgtattacattgaattagagcatttttgaaacgttggggttgttggagtggttggattttccctggaattgagtgagaaattcagaagactgaagcccaggcttactgtctacctttcacggaggcctagccgtgagaggacagaagaaggcacgtggcgaatcatgacagcggacaaagacaaagacaaagacaaagagaaggaccgggaccgagaccgggaccgagagagagagaaaagagacaaagcaagagagagtgagaattcaaggccacgccggagctgtaccttggaaggaggagccaaaaattatgctgagagtgatcacagtgaagacgaggacaatgacaacaatagtgccaccgcagaggagtccacgaagaagaataagaagaaaccaccgaaaaaaaagtctcgttatgaaaggacagataccggtgagataacatcctacatcactgaagatgatgtggtctacagaccaggagactgtgtgtatatcgagagtcggaggccaaacacaccgtatttcatctgtagcattcaagacttcaaactggtccacaactcccaggcctgttgcagatctccaactcctgctttgtgtgaccccccagcatgctctctgccggtggcatcacagccaccacagcatctttctgaagccgggagagggcctgtagggagtaagagggaccatctcctcatgaacgtcaaatggtactaccgtcaatctgaggttccagattctgtgtatcagcatttggttcaggatcgacataatgaaaatgactctggaagagaacttgtcattacagacccagttatcaagaaccgagagctcttcatttctgattacgttgacacttaccatgctgctgcccttagagggaagtgtaacatctcccatttttctgacatatttgctgctagagagtttaaagcccgagtggattcatttttctacatattaggatataaccctgagacaaggaggctgaacagtacccagggggagattcgtgtcggtcctagtcatcaggccaaacttccagatctgcaaccatttccttctccagatggtgatacagtgacccaacatgaggaactggtctggatgcctggagttaacgactgtgacctccttatgtacttgagggcagcaaggagcatggcggcatttgcaggaatgtgtgatggaggctctacagaggacggctgtgtcgcagcctctcgggatgacaccactctgaatgcactgaacacactgcatgaaagcggttacgatgctggcaaagccctgcagcgcctggtgaagaagcctgtgcccaagctcatcgagaagtgctggaccgaggacgaagtgaaacgcttcgttaagggactcaggcagtacgggaagaacttcttcagaattagaaaggagctgcttcccaataaggaaacaggggagctgatcaccttctattactattggaagaagacccccgaagcagccagctcccgagcccatcgtaggcaccgcaggcaggccgtgttcaggaggattaagactcgcaccgcgtccacacccgtcaacacaccctccagacccccgtccagtgaattcttggacctaagttcagccagtgaagatgacttcgacagtgaggacagtgagcaggagctgaaggggtacgcctgccgccactgcttcaccaccacctccaaagattggcaccacggaggccgggagaacatcctgctttgcaccgactgtcgcatccacttcaagaaatacggtgagctcccgcccattgagaagcccgtggacccgccaccgtttatgttcaaacccgtcaaggaagaggatgatgggctcagtgggaagcatagcatgaggacacggcggagtcggggctcgatgtcgacactacgcagtggtcggaagaagcagccagccagccctgatggtcgcacctcacccatcaatgaagacatccgctccagcggccggaactcccccagcgctgccagtacctccagcaatgacagtaaagcagagacagtgaagaagtcggccaagaaggtgaaggaggaagcctcttcccctcttaagagtaacaaacgccagcgggagaaggtggcctctgatacggaggaggctgacaggaccagctccaagaagacaaaaacgcaggagatcagcaggcccaactcgccatctgaaggtgagggagagagttcagacagtcgcagcgtcaacgatgagggtagcagtgaccccaaagacatcgaccaggacaatcgcagcacgtccccgagcatccccagcccccaggacaatgagagtgactcggactcgtcagcccagcagcagatgctgcaggcccagcccccagccttgcaggctcccactggggtcaccccagctccctcctcagctcctccagggacccctcagctgcccacgccagggcccacgccctctgccactgcagttcccccacagggctcccccacggcctcccaggcccctaaccagccacaggctcccacagcgcctgttccccacacccacatccaacaggcaccggccttgcacccccagcggccgccctcaccgcatcccccgccgcatccctcgccacatcccccgctgcagcctctgactgggtcggcgggccagccttctgcaccctctcatgcccagcccccactgcacggtcagggcccacccggccctcacagcctgcaggctgggcccctgctgcagcacccaggccccccacagccctttggcctccctccccaggcctcccaaggccaggcccctctggggacctccccagcagcagcgtaccctcacacctccctgcagctgccagcctctcagtcagcgctgcagtcccaacagcctccacgggagcagcccctgccaccagcgcccttggccatgccccacatcaagcccccgcctaccactcccatcccccagctgccggcgccacaggcccacaagcaccctccccacctctcggggccctcacccttctccatgaatgccaacctgcctccccctccagccctgaagcccctgagctccctgtccacacatcaccccccgtcggctcaccccccacccctgcaactcatgcctcagagccagccattgccctcctcgcccgcccagccccccgggctgacccagagccagaacctgcccccgccccctgcctcccacccccctacaggcctccaccaggtggccccccaacccccgtttgctcagcacccctttgtccctggaggccctcctcccatcacccctccgacctgcccctccacctctaccccaccggcgggacctggcacctcggcccagccaccctgctctggtgcggcggcttcaggaggcagcatagcgggggggtcgtcctgcccactccccaccgtccagatcaaggaggaggctctggacgacgctgaggagcctgagagcccccctcccccaccaaggagcccgtccccggagcccactgtggtggacacccccagtcacgccagccagtcagctaggttctacaaacacctggaccggggctacaactcgtgtgcccggacagacctgtacttcatgcctctggccgggtccaagctggccaagaagagggaggaggccattgagaaggccaagcgcgaggctgagcagaaagcccgagaggagcgagagcgggagaaggagaaggagaaggagcgggagcgggagcgagagcgggagcgcgaggcagagcgggcggctaaggcgtccagctcagcgcatgaaggtcgcctcagtgacccacagctcagtggtcctggccacatgcggccatccttcgagccaccaccaaccaccattgctgctgtgcccccctacatcgggcccgacacacctgcccttcggactctgagcgagtacgcccggccccacgtcatgtcgcccaccaaccgcaaccaccccttctacatgccccttaaccccacggaccccctgctggcctaccacatgcctggcctctacaacgtcgaccccaccatccgcgagcgggagctccgggagcgggagatccgagagcgggagatccgagagcgggagctgcgggagaggatgaagccgggcttcgaggtgaagcccccagagctggaccccctgcacccagccgccaaccccatggagcactttgcccggcacagcgccctcaccatccccccgaccgccgggccccacccttttgcttctttccacccgggcctgaaccccttggagagggagagactggccctggcgggcccccagctgcggcccgagatgagctaccctgacagactggcagccgagcgtatccacgcagagcgcatggcatcgctgaccagcgatcccctggcccgactgcagatgttcaacgtgactccgcaccatcaccagcactctcacattcactcccacctccacctccaccagcaggaccccctccaccaaggttcagcaggccccgttcacccgctggtcgaccccctgactgccggtccccacctggctcgcttcccctacccgcctggcactctccccaaccctctgcttggacagcccccacacgagcacgagatgcttcgccacccagttttcggcaccccctacccccgtgacctgcctggggccatcccaccccccatgtcagcagcccaccagctgcaggccatgcatgcccagtcggccgagctgcagagactggccatggagcagcagtggctgcatggacacccccacatgcatggtggccacctaccaagtcaggaagattattacagtcgactgaagaaagaaggtgacaagcagttataagttatttatttgttaacgctggctgtggaaaccccagttcttggggggagaaacaggactttttacataaaataggagctgcaaaagcaaaaagaatatcttctaaagatttctttatatatttaaaaacccacaactaaaaatgtatccacatagtagtgttcgtttgtcgagaggatttcctgagactggtttggatctccctgcatgacagtcccccagaaacttagtgagtcctggactggactgaacatccagaaagcttccctgcaatcttggggtttggctttagttttcttttccttgatttctcagtaggtgctagaatccagttcacacccttcactgtgcgtgcagacacactgacacactccgccacgagtgctccagagcccacgaggcttgcagatcgggggcataggaatttggaatccaagagctataatttttaaaaaaaaaaatcttttattttaatacattgtaggaaatcttcataattggagaaagttctgcagcatggctttttacgtctgtaaataaataattttagaacagcctttttttcttccataaactactattgtgatctattttttccagccatgtcactaattgtgaattcctaccaactattgacagaatacagagttgattttttaataaaaagttatatataattatccctttaattaaagggagcaaaggggcgttccacatggacagaggcttggaccgaggcctggtcacagcagcgagcatccagggtttgcagggacgatgttacagactctgttttctgcctggcgtttcacttgtgtctgctcctagcctgtgctctgccagcagcacagacatctgctccatcagacctcttccattttgcacagggagtgcaggaggtgaatgttcactttctgttctccagtgtcactgttctgtttccacgggatggaaagcgcatgggcctgtgtccattgtagatttccttctagatttctgtgtacacacacttgattgttctggatgaatgtcttttttaatactccgaaaatttcatcatctaagaaaatgattccatacaaataactcagcacacaagtgacccaggacatatgcctgccaaagggatgtgttagaaggctgccttctcatgcgcattgtcacttggatcttgtggtgaggacggccccatctttcttgccacagattgaggccacttttgagcaagggagatcctggagttaagacaggtgttgggggcagcctgtattttaccctaggggcaggtctgcatggtgaccccacattgcactggtaaaccatttgagtcccactcttcatcctggaagtgggaactggagtcccacccacagtgcattcagaaagcatgctgtgtgggggctgcttctcaggaggccaggcccttctgagcggaaccgtcctggagagagcctgccctcgtttccaggctgcagccgtaacgcactttctcccaggctgagggcgggtgttctggggtgtctgccctctgtcggccctgcttcctgccaggacgtggcctcttccgatccttttctctcagacactggaggtctcttctgccattgtgctggtcccatcccaagaattgtaggacagagaccacactgggtcggcggacacaaagtccatccaggacccaggccgcagagggagcaggaagagatgctgatagtttgatctagaaaccagcagctactggctcaaattcaggttctggcgtcaaatagcgacatttccagtttctcttaaaaaccgtgtttggtttcagttgggataggcttgttttgtctgttgaaaatgtttctagttttttttctttcatttttctctcattccatttctgccttaactttagtttgttcacagggaggcaaagctgacatgaaccttttgtcgtgggacttcaggccacattggcttgaaggcattcgtttccttctggggtggggacaggccctcatggcaggcttgttcccgtggctctgagcgaggcctcttcctgctgggctcccagactcctgcatccaggcccccaccttctcggcttctggtttttctttctttttggtagaacacaacatctaccattcagttaaaccttctttatctcctcctttggcatccatttttccaaagaagagtcgagtcctctgaggtctgtgcttgaaagccgtccgaaggcattcttgttagctttgcttttctccccatatcccaaggcgaagcgctgagattcttccatctaaaaaaccctcgacccgaaaccctcaccagataaactacagtttgtttaggaggccctgaccttcatggtgtctttgaagcccaaccactcggtttccttcggattttcctccctttgttcggggtttggtttggctcctctgtgtgtgtccgtatcttgttcggtgtcctcgaggttgagcttcactccactgcggcagaggcagcgtgcacactcggatttgctacgtttctatatatcttgaagctaaatgtatatatgagtagtttgccatgagataacacagtgtaaacagtagacacccagaaatcgtgacttctgtgttctctccatttgagtattttgtaatttttttgaaatatttgtggacataaataaaaccaagctacactacaaaaaaaaaaaaaaa

SEQ ID NO: 123 - DNA, 1805 bp, Homo sapiens
gcagatggtgctgtcgaccagtgtcaagaccaagtttcatgggttcctggacgctcagccaggggtagtctctgaagggccgcctggcaattgggagcagaagccagtttcccgccatctgctctccgtggaggcagtgctctcgcggctgctgcccgttggggtccagctgaggaaggagcgcggatcccaggctcgttctttgcctgggctgcccctgcggcccctggggcgggtgctgctgcggcgccagctccaagggcggatccaggcgggaggggcctcctcggagaagcggggcgcggtcccaactacgcagaggctggcacgccgaccctccacacctcaccacgcccccatctccgtccgtgtacacacactcacacaaggacgccaaccccacctagatgcaaagcaggattcaaaagaacatctttgcgttttctaccggctccccatcatcgtactagggaggaagaagcgggtgagaaacaaaacttctttccattgtcctgcccgtttctgcggacttgttctgaggccgaggcacctctaagatactgatggctctgcagaggacccattcattgcttctgcttttgctgctgaccctgctggggctggggctggtccagccctcctatggccaggatggcatgtaccagcgattcctgcggcaacacgtgcaccctgaggagacaggtggcagtgatcgctactgcaacttgatgatgcaaagacggaagatgactttgtatcactgcaagcgcttcaacaccttcatccatgaagatatctggaacattcgtagtatctgcagcaccaccaatatccaatgcaagaacggcaagatgaactgccatgagggtgtagtgaaggtcacagattgcagggacacaggaagttccagggcacccaactgcagatatcgggccatagcgagcactagacgtgttgtcattgcctgtgagggtaacccacaggtgcctgtgcactttgacggttagatgccaccatgtagggattatcgcgagtggttgaccttacacttactccttaaatagcagtgagtaatgcatttgagctgtcccaggctctgtctcctcagctcatttcctactctttttctctatataactcattctattaaatacattgcaccaaagagatatggagacataaacctgtaatgaatgaggctgggcttttctgtaataagcttccttttataatactggtcagcttagctctctcagatcctatcctgtggaatttagttattatgtgtatttatgtagtatttcaaacatttcaaaatgctttcatctatgtttatcacattttaataccacagcacttataatgatgtcactacatatagaagctcaaagttaagggatttgctgaagactgtaaagttaatggaagaattgagacaaaaatccagtgtagctggccacttatccagggctttttctacttcatcacaaggaatgttttgaaagtgtctgctttttttatccttaaaattcacctgtcagggaggcattaaaaatttggaaatgtatgccagcaaaatgtgagctctgtattttttggcattcttatgtttgggtttaataagattaagaaaatgatactgggaattttctttttcctgaaactttgaatcaccctagtaagtcaaagtactaaaaaatgtactagatcattaagacttatgtgctcttactgattgaaagattttttatgttttccttgtaataaaggacctaaaccgaaggtacctgaaaaaaaaaaaaaaa

SEQ ID NO: 124 - DNA, 1142 bp, Homo sapiens
cttttccaagcggctgccgaagatggcggaggtgcaggtcctggtgcttgatggtcgaggccatctcctgggccgcctggcggccatcgtggctaaacaggtactgctgggccggaaggtggtggtcgtacgctgtgaaggcatcaacatttctggcaatttctacagaaacaagttgaagtacctggctttcctccgcaagcggatgaacaccaacccttcccgaggcccctaccacttccgggcccccagccgcatcttctggcggaccgtgcgaggtatgctgccccacaaaaccaagcgaggccaggccgctctggaccgtctcaaggtgtttgacggcatcccaccgccctacgacaagaaaaagcggatggtggttcctgctgccctcaaggtcgtgcgtctgaagcctacaagaaagtttgcctatctggggcgcctggctcacgaggttggctggaagtaccaggcagtgacagccaccctggaggagaagaggaaagagaaagccaagatccactaccggaagaagaaacagctcatgaggctacggaaacaggccgagaagaacgtggagaagaaaattgacaaatacacagaggtcctcaagacccacggactcctggtctgagcccaataaagactgttaattcctcatgcgttgcctgcccttcctccattgttgccctggaatgtacgggacccaggggcagcagcagtccaggtgccacaggcagccctgggacataggaagctgggagcaaggaaagggtcttagtcactgcctcccgaagttgcttgaaagcactcggagaattgtgcaggtgtcatttatctatgaccaataggaagagcaaccagttactatgagtgaaagggagccagaagactgattggagggccctatcttgtgagtggggcatctgttggactttccacctggtcatatactctgcagctgttagaatgtgcaagcacttggggacagcatgagcttgctgttgtacacagggtatttctagaagcagaaatagactgggaagatgcacaaccaaggggttacaggcatcgcccatgctcctcacctgtattttgtaatcagaaataaattgcttttaaagaaaaaaaaaaaaaaaaaa

SEQ ID NO: 125 - DNA, 3834 bp, Homo sapiens
cctgagacagaggcagcagtgatacccacctgagagatcctgtgtttgaacaactgcttcccaaaacggaaagtatttcaagcctaaacctttgggtgaaaagaactcttgaagtcatgattgcttcacagtttctctcagctctcactttggtgcttctcattaaagagagtggagcctggtcttacaacacctccacggaagctatgacttatgatgaggccagtgcttattgtcagcaaaggtacacacacctggttgcaattcaaaacaaagaagagattgagtacctaaactccatattgagctattcaccaagttattactggattggaatcagaaaagtcaacaatgtgtgggtctgggtaggaacccagaaacctctgacagaagaagccaagaactgggctccaggtgaacccaacaataggcaaaaagatgaggactgcgtggagatctacatcaagagagaaaaagatgtgggcatgtggaatgatgagaggtgcagcaagaagaagcttgccctatgctacacagctgcctgtaccaatacatcctgcagtggccacggtgaatgtgtagagaccatcaataattacacttgcaagtgtgaccctggcttcagtggactcaagtgtgagcaaattgtgaactgtacagccctggaatcccctgagcatggaagcctggtttgcagtcacccactgggaaacttcagctacaattcttcctgctctatcagctgtgataggggttacctgccaagcagcatggagaccatgcagtgtatgtcctctggagaatggagtgctcctattccagcctgcaatgtggttgagtgtgatgctgtgacaaatccagccaatgggttcgtggaatgtttccaaaaccctggaagcttcccatggaacacaacctgtacatttgactgtgaagaaggatttgaactaatgggagcccagagccttcagtgtacctcatctgggaattgggacaacgagaagccaacgtgtaaagctgtgacatgcagggccgtccgccagcctcagaatggctctgtgaggtgcagccattcccctgctggagagttcaccttcaaatcatcctgcaacttcacctgtgaggaaggcttcatgttgcagggaccagcccaggttgaatgcaccactcaagggcagtggacacagcaaatcccagtttgtgaagctttccagtgcacagccttgtccaaccccgagcgaggctacatgaattgtcttcctagtgcttctggcagtttccgttatgggtccagctgtgagttctcctgtgagcagggttttgtgttgaagggatccaaaaggctccaatgtggccccacaggggagtgggacaacgagaagcccacatgtgaagctgtgagatgcgatgctgtccaccagcccccgaagggtttggtgaggtgtgctcattcccctattggagaattcacctacaagtcctcttgtgccttcagctgtgaggagggatttgaattatatggatcaactcaacttgagtgcacatctcagggacaatggacagaagaggttccttcctgccaagtggtaaaatgttcaagcctggcagttccgggaaagatcaacatgagctgcagtggggagcccgtgtttggcactgtgtgcaagttcgcctgtcctgaaggatggacgctcaatggctctgcagctcggacatgtggagccacaggacactggtctggcctgctacctacctgtgaagctcccactgagtccaacattcccttggtagctggactttctgctgctggactctccctcctgacattagcaccatttctcctctggcttcggaaatgcttacggaaagcaaagaaatttgttcctgccagcagctgccaaagccttgaatcagacggaagctaccaaaagccttcttacatcctttaagttcaaaagaatcagaaacaggtgcatctggggaactagagggatacactgaagttaacagagacagataactctcctcgggtctctggcccttcttgcctactatgccagatgcctttatggctgaaaccgcaacacccatcaccacttcaatagatcaaagtccagcaggcaaggacggccttcaactgaaaagactcagtgttccctttcctactctcaggatcaagaaagtgttggctaatgaagggaaaggatattttcttccaagcaaaggtgaagagaccaagactctgaaatctcagaattccttttctaactctcccttgctcgctgtaaaatcttggcacagaaacacaatattttgtggctttctttcttttgcccttcacagtgtttcgacagctgattacacagttgctgtcataagaatgaataataattatccagagtttagaggaaaaaaatgactaaaaatattataacttaaaaaaatgacagatgttgaatgcccacaggcaaatgcatggagggttgttaatggtgcaaatcctactgaatgctctgtgcgagggttactatgcacaatttaatcactttcatccctatgggattcagtgcttcttaaagagttcttaaggattgtgatatttttacttgcattgaatatattataatcttccatacttcttcattcaatacaagtgtggtagggacttaaaaaacttgtaaatgctgtcaactatgatatggtaaaagttacttattctagattaccccctcattgtttattaacaaattatgttacatctgttttaaatttatttcaaaaagggaaactattgtcccctagcaaggcatgatgttaaccagaataaagttctgagtgtttttactacagttgttttttgaaaacatggtagaattggagagtaaaaactgaatggaaggtttgtatattgtcagatattttttcagaaatatgtggtttccacgatgaaaaacttccatgaggccaaacgttttgaactaataaaagcataaatgcaaacacacaaaggtataattttatgaatgtctttgttggaaaagaatacagaaagatggatgtgctttgcattcctacaaagatgtttgtcagatgtgatatgtaaacataattcttgtatattatggaagattttaaattcacaatagaaactcaccatgtaaaagagtcatctggtagatttttaacgaatgaagatgtctaatagttattccctatttgttttcttctgtatgttagggtgctctggaagagaggaatgcctgtgtgagcaagcatttatgtttatttataagcagatttaacaattccaaaggaatctccagttttcagttgatcactggcaatgaaaaattctcagtcagtaattgccaaagctgctctagccttgaggagtgtgagaatcaaaactctcctacacttccattaacttagcatgtgttgaaaaaaaaagtttcagagaagttctggctgaacactggcaacgacaaagccaacagtcaaaacagagatgtgataaggatcagaacagcagaggttcttttaaaggggcagaaaaactctgggaaataagagagaacaactactgtgatcaggctatgtatggaatacagtgttattttctttgaaattgtttaagtgttgtaaatatttatgtaaactgcattagaaattagctgtgtgaaataccagtgtggtttgtgtttgagttttattgagaattttaaattataacttaaaatattttataatttttaaagtatatatttatttaagcttatgtcagacctatttgacataacactataaaggttgacaataaatgtgcttatgttt

SEQ ID NO: 126 - DNA, 2448 bp, Homo sapiens
aaggggagggaaaaggggaggaggaggaggatgtgagactgggttagagaaatgaaagaaagcaaggctttctgttgacattcagtgcagtctacctgcagcacagcacactccctttgggcaaggacctgagacccttgtgctaagtcaagaggctcaatgggctgcagaagaactagagaaggaccaagcaaagccatgatatttccatggaaatgtcagagcacccagagggacttatggaacatcttcaagttgtgggggtggacaatgctctgttgtgatttcctggcacatcatggaaccgactgctggacttaccattattctgaaaaacccatgaactggcaaagggctagaagattctgccgagacaattacacagatttagttgccatacaaaacaaggcggaaattgagtatctggagaagactctgcctttcagtcgttcttactactggataggaatccggaagataggaggaatatggacgtgggtgggaaccaacaaatctcttactgaagaagcagagaactggggagatggtgagcccaacaacaagaagaacaaggaggactgcgtggagatctatatcaagagaaacaaagatgcaggcaaatggaacgatgacgcctgccacaaactaaaggcagccctctgttacacagcttcttgccagccctggtcatgcagtggccatggagaatgtgtagaaatcatcaataattacacctgcaactgtgatgtggggtactatgggccccagtgtcagtttgtgattcagtgtgagcctttggaggccccagagctgggtaccatggactgtactcaccctttgggaaacttcagcttcagctcacagtgtgccttcagctgctctgaaggaacaaacttaactgggattgaagaaaccacctgtggaccatttggaaactggtcatctccagaaccaacctgtcaagtgattcagtgtgagcctctatcagcaccagatttggggatcatgaactgtagccatcccctggccagcttcagctttacctctgcatgtaccttcatctgctcagaaggaactgagttaattgggaagaagaaaaccatttgtgaatcatctggaatctggtcaaatcctagtccaatatgtcaaaaattggacaaaagtttctcaatgattaaggagggtgattataaccccctcttcattccagtggcagtcatggttactgcattctctgggttggcatttatcatttggctggcaaggagattaaaaaaaggcaagaaatccaagagaagtatgaatgacccatattaaatcgcccttggtgaaagaaaattcttggaatactaaaaatcatgagatcctttaaatccttccatgaaacgttttgtgtggtggcacctcctacgtcaaacatgaagtgtgtttccttcagtgcatctgggaagatttctacctgaccaacagttccttcagcttccatttcgcccctcatttatccctcaacccccagcccacaggtgtttatacagctcagctttttgtcttttctgaggagaaacaaataagaccataaagggaaaggattcatgtggaatataaagatggctgactttgctctttcttgactcttgttttcagtttcaattcagtgctgtacttgatgacagacacttctaaatgaagtgcaaatttgatacatatgtgaatatggactcagttttcttgcagatcaaatttcacgtcgtcttctgtatactgtggaggtacactcttatagaaagttcaaaaagtctacgctctcctttctttctaactccagtgaagtaatggggtcctgctcaagttgaaagagtcctatttgcactgtagcctcgccgtctgtgaattggaccatcctatttaactggcttcagcctccccaccttcttcagccacctctctttttcagttggctgacttccacacctagcatctcatgagtgccaagcaaaaggagagaagagagaaatagcctgcgctgttttttagtttgggggttttgctgtttccttttatgagacccattcctatttcttatagtcaatgtttcttttatcacgatattattagtaagaaaacatcactgaaatgctagctgcaagtgacatctctttgatgtcatatggaagagttaaaacaggtggagaaattccttgattcacaatgaaatgctctcctttcccctgcccccagaccttttatccacttacctagattctacatattctttaaatttcatctcaggcctccctcaaccccaccacttcttttataactagtcctttactaatccaacccatgatgagctcctcttcctggcttcttactgaaaggttaccctgtaacatgcaattttgcatttgaataaagcctgctttttaagtgttaaaaaaaaaaaaaaaa

SEQ ID NO: 127 - DNA, 3199 bp, Homo sapiens
gtttttctaaacagcctgacactgaggggaggcagtgagactgtaagcagtctgggttgggcagaaggcagaaaaccagcagagtcacagaggagatggccaactgccaaatagccatcttgtaccagagattccagagagtggtctttggaatttcccaactcctttgcttcagtgccctgatctctgaactaacaaaccagaaagaagtggcagcatggacttatcattacagcacaaaagcatactcatggaatatttcccgtaaatactgccagaatcgctacacagacttagtggccatccagaataaaaatgaaattgattacctcaataaggtcctaccctactacagctcctactactggattgggatccgaaagaacaataagacatggacatgggtgggaaccaaaaaggctctcaccaacgaggctgagaactgggctgataatgaacctaacaacaaaaggaacaacgaggactgcgtggagatatacatcaagagtccgtcagcccctggcaagtggaatgatgagcactgcttgaagaaaaagcacgcattgtgttacacagcctcctgccaggacatgtcctgcagcaaacaaggagagtgcctcgagaccatcgggaactacacctgctcctgttaccctggattctatgggccagaatgtgaatacgtgagagagtgtggagaacttgagctccctcaacacgtgctcatgaactgcagccaccctctgggaaacttctcttttaactcgcagtgcagcttccactgcactgacgggtaccaagtaaatgggcccagcaagctggaatgcttggcttctggaatctggacaaataagcctccacagtgtttagctgcccagtgcccacccctgaagattcctgaacgaggaaacatgatctgccttcattctgcaaaagcattccagcatcagtctagctgcagcttcagttgtgaagagggatttgcattagttggaccggaagtggtgcaatgcacagcctcgggggtatggacagccccagccccagtgtgtaaagctgtgcagtgtcagcacctggaagcccccagtgaaggaaccatggactgtgttcatccgctcactgcttttgcctatggctccagctgcaaatttgagtgccagcccggctacagagtgaggggcttggacatgctccgctgcattgactctggacactggtctgcacccttgccaacctgtgaggctatttcgtgtgagccgctggagagtcctgtccacggaagcatggattgctctccatccttgagagcgtttcagtatgacaccaactgtagcttccgctgtgctgaaggtttcatgctgagaggagccgatatagttcggtgtgataacttgggacagtggacagcaccagccccagtctgtcaagctttgcagtgccaggatctcccagttccaaatgaggcccgggtgaactgctcccaccccttcggtgcctttaggtaccagtcagtctgcagcttcacctgcaatgaaggcttgctcctggtgggagcaagtgtgctacagtgcttggctactggaaactggaattctgttcctccagaatgccaagccattccctgcacacctttgctaagccctcagaatggaacaatgacctgtgttcaacctcttggaagttccagttataaatccacatgtcaattcatctgtgacgagggatattctttgtctggaccagaaagattggattgtactcgatcgggacgctggacagactccccaccaatgtgtgaagccatcaagtgcccagaactctttgccccagagcagggcagcctggattgttctgacactcgtggagaattcaatgttggctccacctgtcatttctcttgtaacaatggctttaagctggaggggcccaataatgtggaatgcacaacttctggaagatggtcagctactccaccaacctgcaaaggcatagcatcacttcctactccagggttgcaatgtccagccctcaccactcctgggcagggaaccatgtactgtaggcatcatccgggaacctttggttttaataccacttgttactttggctgcaacgctggattcacactcataggagacagcactctcagctgcagaccttcaggacaatggacagcagtaactccagcatgcagagctgtgaaatgctcagaactacatgttaataagccaatagcgatgaactgctccaacctctggggaaacttcagttatggatcaatctgctctttccattgtctagagggccagttacttaatggctctgcacaaacagcatgccaagagaatggccactggtcaactaccgtgccaacctgccaagcaggaccattgactatccaggaagccctgacttactttggtggagcggtggcttctacaataggtctgataatgggtgggacgctcctggctttgctaagaaagcgtttcagacaaaaagatgatgggaaatgccccttgaatcctcacagccacctaggaacatatggagtttttacaaacgctgcatttgacccgagtccttaaggtttccataaacacccatgaatcaaagacatggaattaccttagattagctctggaccagcctgttggacccgctctggaccaaccctgtttcctgagtttgggattgtggtacaatctcaaattctcaacctaccaccccttcctgtcccacctcttctcttcctgtaacacaagccacagaagccaggagcaaatgtttctgcagtagtctctgtgctttgactcacctgttacttgaaataccagtgaaccaaagagactggagcatctgactcacaagaagaccagactgtggagaaataaaaatacctctttattttttgattgaaggaaggttttctccactttgttggaaagcaggtggcatctctaattggaagaaattcctgtagcatcttctggagtctccagtggttgctgttgatgaggcctcttggacctctgctctgaggcttccagagagtcctctggatggcaccagaggctgcagaaggccaagaatcaagctagaaggccacatgtcaccgtggaccttcctgccaccagtcactgtccctcaaatgacccaaagaccaatattcaaatgcgtaattaaaagaattttcccc

SEQ ID NO: 128 - DNA, 4452 bp, Homo sapiens
ctgtcactgcagactaatgggacggaggggggtgacttctcagggttcctcctgggcaggtgctccggaaccttttctcagcacgctggcctggggcacggccgttcctcctgcccagccacgttggggtacagggtgaagaagggctggggccagcccaggacagaggaaggcgaggcaggcacgcaggaactgggctttttaaacccttaagcccaaggaaatcgtagcatcgcgggacagggaaaatgaaagactttggaagtcgtcaggaatttgactctgtgagttggtttccaagagtctaagttaagcatctccaagtggatattaaaaaggagcagcaagcctcggggcggcgggggctggaggaggtggagagaggaggctgccggaagccgcactcgggacctctgcagccaccgaccagaccgggcggccgggactctgggactctcgcaggcagacccggtggtctgccggactcctcggggcccacttcgggccctctctcctgcctcctatttttggatttctctcctttgctccctttttcctcccgttttgaagagacaatgctacttcagtttggagcacaaacatatgatcagcacatggaaatgtggtaattcggatgcattcgtgattgcaacagattgaagaaattagaccagacaaagagtgtttttagaggaggaggaggaggaggaggaggctgagagagggagggcgacgggggtgagaaaggggaggccgcctctgagcgggacgccgggactcccgccgctgctaaatatatccgtaggaatggagagggaccggatctcagccttgaaaagatcttttgaggtcgaggaggtcgagacacccaactccaccccaccccggagggtccagactcccctactccgagccactgtggccagctccacccagaaattccaggacctgggcgtgaagaactcagaaccctcggcccgccatgtggactccctaagccaacgctcccccaaggcgtccctgcggagggtggagctctcgggccccaaggcggccgagccggtgtcccggcgcactgagctgtccattgacatctcgtccaagcaggtggagaacgccggggccatcggcccgtcccggttcgggctcaagagggccgaggtgttgggccacaagacgccagaaccggcccctcggaggacggagatcaccatcgtcaaaccccaggagtcagcccaccggaggatggagccccctgcctccaaggtccccgaggtgcccactgcccctgccaccgacgcagcccccaagagggtggagatccagatgcccaagcctgctgaggcgcccaccgcccccagcccagcccagaccttggagaattcagagcctgcccctgtgtctcagctgcagagcaggctggagcccaagccccagccccctgtggctgaggctacaccccggagccaggaggccactgaggcggctcccagctgcgttggcgacatggccgacacccccagagatgccgggctcaagcaggcgcctgcatcacggaacgagaaggccccggtggacttcggctacgtggggattgactccatcctggagcagatgcgccggaaggccatgaagcagggcttcgagttcaacatcatggtggtcgggcagagcggcttgggtaaatccaccttaatcaacaccctcttcaaatccaaaatcagccggaagtcggtgcagcccacctcagaggagcgcatccccaagaccatcgagatcaagtccatcacgcacgatattgaggagaaaggcgtccggatgaagctgacagtgattgacacaccagggttcggggaccacatcaacaacgagaactgctggcagcccatcatgaagttcatcaatgaccagtacgagaaatacctgcaggaggaggtcaacatcaaccgcaagaagcgcatcccggacacccgcgtccactgctgcctctacttcatccccgccaccggccactccctcaggcccctggacatcgagtttatgaaacgcctgagcaaggtggtcaacatcgtccctgtcatcgccaaggcggacacactcaccctggaggagagggtccacttcaaacagcggatcaccgcagacctgctgtccaacggcatcgacgtgtacccccagaaggaatttgatgaggactcggaggaccggctggtgaacgagaagttccgggagatgatcccatttgctgtggtgggcagtgaccacgagtaccaggtcaacggcaagaggatccttgggaggaagaccaagtggggtaccatcgaagttgaaaacaccacacactgtgagtttgcctacctgcgggaccttctcatcaggacgcacatgcagaacatcaaggacatcaccagcagcatccacttcgaggcgtaccgtgtgaagcgcctcaacgagggcagcagcgccatggccaacggcatggaggagaaggagccagaagccccggagatgtagacgccaccctgcccacccccgggatcctgcccccaagtcatttccgtccccccccaggccctcccaccaccccattttattttatatgattttctccatttgtcatcgttccccaccccttcgacatgctgccaggaaacaagggaaggggcctccctccgagtgagtcagtgatgaggccgcggcctccccgaggttgtggggaggctgcactggagccacaggcaggggtgagagcacccactgaattgacatgaccctctgtccccaggcctggctccccgagggctcagaagagcagcttcggtgtgcagatcatccgtctgtgtggggttctcagtgccggaggccttggggtgggggccaggcctcgcacttgcagaggagcccagtgggctgcacgctcccctccatccccatcggccctgtcccctggagtgtgtcagagcccaggggagaatgcagcccaccaggagcacctggaccccctgcccgccacatggtgtggccatcactcagcccctacccctgccctgctcctaagggtagaaaactccagggtcccctgccaccgactgcccagccactccaagccccctggcagctgcccctcctggagcagaaagtgcctttatctcagccatccgcagactgcttggccagatgcggggacaggctggaatgagggaggcgtcttcatctccctgccatccccctctcacgccacccccgcccccaccgggctgcaggtgctgctgatgcgctgggatctgattgaggataaaaaggaaggagagatgacccctaccccctcatcccccagttttgaaaaggtctaagcaagtgagtctggtggaggagctgagggagggagccatggaaggtgccagaaggaaggttggcgggggcacgtgtgggccgtggcttgggctggtcagagtggcgtgagctgcccggcgcctgccctgcccaagtgaccagggaagtgtgtgtgtgtccatgtgtatgcgtgtccgtctgtctgtctagtgtctgggtttggcccaagactgggctgtagttacattaatgcccagccagccacccctgccactcacccttcctggcccaggccttgctgactctctgagctggggaggtgggaggccaggcgagcctgactctgttgatctacccgtgcctgggcccctcccctcagagcccatggtaacgaacccctagaaaggagagaacgggcgtcaggggtgcacagtccacagctgaagagcaaggtttcgtggcagcacggcccggcccctcaccctctgtccccacgaggggacccatgggggctgtctttgcagggcacagatgaccaaagtcccttcctgcttcctgttacctgtcttgctcctggggagaaagaggggcctgatgagactccactcaggtgcacacatcaccaggtgcatctgcaggcaccgggctggctgcttgcagccaggagaaggtcagcgagaaggagtgtatgagtgtgagtgtgtgtgcatggaagttggggcactgggcgtctgactccctccccacccaagagaggaaggacccctcaccacccccactggtgagacagtttactttgccaacttgccatgtttttgccaaaaccaagattttgaaggaaatgagtggccagcgccagggcccaggccatgtggcctgcccagcctcaatgtcacttggtggcggggtggggtgggggtgggcagcagcatcccagccttgagatgcttcactttccttctctgtaaccagactttgaaaaattgttcgtttcatcaggctctgttcctcaatggccttttgctacgtgcctcccgagaaatttgtctttttgtataaatgacaaagtgttgaaaatgtatttcctgaaataaatgtttcaaatgcagaaacccagaa

SEQ ID NO: 129 - DNA, 3794 bp, Homo sapiens
tttgaatttcagataaatttattttgctttctggtataagtatatcccatgcagcatttcggacatacttataccaaaaaacataaaataaaatactttatattgtctgtgaaagctttaaccaggcatcctgcattttacctgacaagaccagccccctccagtaacggtcccttcccctgtacccaccacctccaccaccagtggcccagataagggtagctcactgtggacttctcacttctgcttttccgatgacccagggcccagagggagagcccccaccccactaccccacccccagccaggcccccaggatagacacaagcctgccctctcctcctacacagggagctctggaaggaccagctcaacaagcccaaggccaggctgggcccccaggagacccagaggacaactgggcaaggtgggccggagagtgtgggggaaggcaaaggagttctgtgagctcagcgtctgaagctcatttcatgcatcaggccccagggctcagcttccgccttcggcttccccttctgccaagagccctgagccactcacagcacgaccagagaacaggcctgtctcaggcaggccctgcgcctcctatgcggagatgctactgccactgctgctgtcctcgctgctgggcgggtcccaggctatggatgggagattctggatacgagtgcaggagtcagtgatggtgccggagggcctgtgcatctctgtgccctgctctttctcctacccccgacaggactggacagggtctaccccagcttatggctactggttcaaagcagtgactgagacaaccaagggtgctcctgtggccacaaaccaccagagtcgagaggtggaaatgagcacccggggccgattccagctcactggggatcccgccaaggggaactgctccttggtgatcagagacgcgcagatgcaggatgagtcacagtacttctttcgggtggagagaggaagctatgtgagatataatttcatgaacgatgggttctttctaaaagtaacagccctgactcagaagcctgatgtctacatccccgagaccctggagcccgggcagccggtgacggtcatctgtgtgtttaactgggcctttgaggaatgtccacccccttctttctcctggacgggggctgccctctcctcccaaggaaccaaaccaacgacctcccacttctcagtgctcagcttcacgcccagaccccaggaccacaacaccgacctcacctgccatgtggacttctccagaaagggtgtgagcgcacagaggaccgtccgactccgtgtggcctatgcccccagagaccttgttatcagcatttcacgtgacaacacgccagccctggagccccagccccagggaaatgtcccatacctggaagcccaaaaaggccagttcctgcggctcctctgtgctgctgacagccagccccctgccacactgagctgggtcctgcagaacagagtcctctcctcgtcccatccctggggccctagacccctggggctggagctgcccggggtgaaggctggggattcagggcgctacacctgccgagcggagaacaggcttggctcccagcagcgagccctggacctctctgtgcagtatcctccagagaacctgagagtgatggtttcccaagcaaacaggacagtcctggaaaaccttgggaacggcacgtctctcccagtactggagggccaaagcctgtgcctggtctgtgtcacacacagcagccccccagccaggctgagctggacccagaggggacaggttctgagcccctcccagccctcagaccccggggtcctggagctgcctcgggttcaagtggagcacgaaggagagttcacctgccacgctcggcacccactgggctcccagcacgtctctctcagcctctccgtgcactactccccgaagctgctgggcccctcctgctcctgggaggctgagggtctgcactgcagctgctcctcccaggccagcccggccccctctctgcgctggtggcttggggaggagctgctggaggggaacagcagccaggactccttcgaggtcacccccagctcagccgggccctgggccaacagctccctgagcctccatggagggctcagctccggcctcaggctccgctgtgaggcctggaacgtccatggggcccagagtggatccatcctgcagctgccagataagaagggactcatctcaacggcattctccaacggagcgtttctgggaatcggcatcacggctcttcttttcctctgcctggccctgatcatcatgaagattctaccgaagagacggactcagacagaaaccccgaggcccaggttctcccggcacagcacgatcctggattacatcaatgtggtcccgacggctggccccctggctcagaagcggaatcagaaagccacaccaaacagtcctcggacccctcttccaccaggtgctccctccccagaatcaaagaagaaccagaaaaagcagtatcagttgcccagtttcccagaacccaaatcatccactcaagccccagaatcccaggagagccaagaggagctccattatgccacgctcaacttcccaggcgtcagacccaggcctgaggcccggatgcccaagggcacccaggcggattatgcagaagtcaagttccaatgagggtctcttaggctttaggactgggacttcggctagggaggaaggtagagtaagaggttgaagataacagagtgcaaagtttccttctctccctctctctctctctttctctctctctctctctttctctctcttttaaaaaaacatctggccagggcacagtggctcacgcctgtaatcccagcactttgggaggttgaggtgggcagatcgcctgaggtcgggagttcgagaccagcctggccaacttggtgaaaccccgtctctactaaaaatacaaaaattagctgggcatggtggcaggcgcctgtaatcctacctacttgggaagctgaggcaggagaatcacttgaacctgggagacggaggttgcagtgagccaagatcacaccattgcacgccagcctgggcaacaaagcgagactccatctcaaaaaaaaaatcctccaaatgggttgggtgtctgtaatcccagcactttgggaggctaaggtgggtggattgcttgagcccaggagttcgagaccagcctgggcaacatggtgaaaccccatctctacaaaaaatacaaaacatagctgggcttggtggtgtgtgcctgtagtcccagctgtcagacatttaaaccagagcaactccatctggaataggagctgaataaaatgaggctgagacctactgggctgcattctcagacagtggaggcattctaagtcacaggatgagacaggaggtccgtacaagatacaggtcataaagactttgctgataaaacagattgcagtaaagaagccaaccaaatcccaccaaaaccaagttggccacgagagtgacctctggtcgtcctcactgctacactcctgacagcaccatgacagtttacaaatgccatggcaacatcaggaagttacccgatatgtcccaaaagggggaggaatgaataatccaccccttgtttagcaaataagcaagaaataaccataaaagtgggcaaccagcagctctaggcgctgctcttgtctatggagtagccattcttttgttcctttactttcttaataaacttgctttcaccttaaaaaaa

SEQ ID NO: 130 - DNA, 3183 bp, Homo sapiens
cgaggctcctcctctgtggatggtcactgcccctccaccaggcttcctgctggaggagtttccttcccagccaggccggcccagaagccagatggtcccgggacaggcccagccccagagcccagagatgctgctgctgcccctgctgctgcccgtgctgggggcggggtccctgaacaaggatcccagttacagtcttcaagtgcagaggcaggtgccggtgccggagggcctgtgtgtcatcgtgtcttgcaacctctcctacccccgggatggctgggacgagtctactgctgcttatggctactggttcaaaggacggaccagcccaaagacgggtgctcctgtggccactaacaaccagagtcgagaggtggaaatgagcacccgggaccgattccagctcactggggatcccggcaaagggagctgctccttggtgatcagagacgcgcagagggaggatgaggcatggtacttctttcgggtggagagaggaagccgtgtgagacatagtttcctgagcaatgcgttctttctaaaagtaacagccctgactaagaagcctgatgtctacatccccgagaccctggagcccgggcagccggtgacggtcatctgtgtgtttaactgggctttcaagaaatgtccagccccttctttctcctggacgggggctgccctctcccctagaagaaccagaccaagcacctcccacttctcagtgctcagcttcacgcccagcccccaggaccacgacaccgacctcacctgccatgtggacttctccagaaagggtgtgagcgcacagaggaccgtccgactccgtgtggcctatgcccccaaagaccttattatcagcatttcacatgacaacacgtcagccctggaactccagggaaacgtcatatatctggaagttcagaaaggccagttcctgcggctcctctgtgctgctgacagccagccccctgccacgctgagctgggtcctgcaggacagagtcctctcctcgtcccacccctggggccccagaaccctggggctggagctgcgtggggtaagggccggggattcagggcgctacacctgccgagcggagaacaggcttggctcccagcagcaagccctggacctctctgtgcagtatcctccagagaacctgagagtgatggtttcccaagcaaacaggacagtcctggaaaacctcgggaacggcacatccctcccggtcctggagggccaaagcctgcgcctggtctgtgtcacccacagcagccccccagccaggctgagctggacccggtggggacagaccgtgggcccctcccagccctcagaccccggggtcctggagctgccacccattcaaatggagcacgaaggagagttcacctgccacgctcagcaccctctgggctcccagcacgtctctctcagcctctccgtgcactaccctccacagctgctgggcccctcctgctcctgggaggctgagggtctgcactgcagctgctcctcccaggccagcccggccccctctctgcgctggtggcttggggaggagctgctggaggggaacagcagtcagggctccttcgaggtcacccccagctcagccgggccctgggccaacagctccctgagcctccatggagggctcagctccggcctcaggctccgctgtaaggcctggaacgtccacggggcccagagtggctctgtcttccagctgctaccagggaagctggagcatgggggaggacttggcctgggggctgccctgggagctggcgtcgctgccctgctcgctttctgttcctgccttgtcgtcttcagggtgaagatctgcaggaaggaagctcgcaagagggcagcagctgagcaggacgtgccctccaccctgggacccatctcccagggtcaccagcatgaatgctcggcaggcagctcccaagaccacccgcccccaggtgcagccacctacaccccggggaagggggaagagcaggagctccactatgcctccctcagcttccagggcctgaggctctgggagcctgcggaccaggaggcccccagcaccaccgagtactcggagatcaagatccacacaggacagcccctgaggggcccaggctttgggcttcaattggagagggagatgtcagggatggttccaaagtgaagaggtctccatggcaacaggacaccagcaagtgtgtgggagtcgcactggtgtgacggccagaactggactcagatttcagccccatccccaatgaagagcttgagtttgaagattatactttttttgagacagggtctgactctgtcctccaggccggagtccagtggtgcaatctcggctcactgtagcctcaacctgccaggttgaagtgagcctcccatttcagcctcccaagtggctgggactacaattgtgagccaccatgccaggctcattgttgtatttttggtagagacagggttttgccatgtttccctggctggtctcggactcctgggctcaagcaatctgcccgcctctgcctcccaaggtgctgggattgcagacgtgagccaccacagctggctgaagattatactttcaattcagagcgagtttgaagatgacactttgaggcatcgtgtctatggttcattactacagaagcttctctggatgtgtaaagcacaggaaaccaggcagaggaggcacagggtgctctccagaacgagaagccagctcctggagttgtttgctgcaactgccattccccgttgatgaccatgctcttccttcagaagagggagagtgagaggaccaagtccaagtggttcccatttgaacatttaaaaaaaaaaaaaaggctgggcatggtggctcacgcctgtggtctcagcactttgggaggctgaagtgggtggatcacaagtcaggagttcgagaccagcctgggcaagatggtgaaaccccatctctactggaaatgcaaaggttagccgggcatggtggcgggcgcctaaaatcccagctactcgggagactaggcagagaattggttgaacccgggaggtggaggttgcagtgagccgagatcgtcccactgcactccagcctgggcaacagagtgagactctgtttctaaataaataaacgaaaaaaaaaaaaaaaaaaaa

SEQ ID NO: 131 - DNA, 2126 bp, Homo sapiens
gaagaaccctgaggaacagacttacctcagcaaccctggcacctccaacccgacacatgctactgctgctgctactgctgccacccctgctctgtgggagagtgggggctaaggaacagaaggattacctgctgacaatgcagaagtccgtgacggtgcaggagggcctgtgtgtctctgtgctttgctccttctcctacccccaaaatggctggactgcctccgatccagttcatggctactggttccgggcaggggaccatgtaagccggaacattccagtggccacaaacaacccagctcgagcagtgcaggaggagactcgggaccgattccacctccttggggacccacagaacaaggattgtaccctgagcatcagagacaccagagagagtgatgcagggacatacgtcttttgtgtagagagaggaaatatgaaatggaattataaatatgaccagctctctgtgaatgtgacagcgtcccaggacctactgtcaagatacaggctggaggtgccagagtcggtgactgtgcaggagggtctgtgtgtctctgtgccctgcagtgtcctttacccccattacaactggactgcctctagccctgtttatggatcctggttcaaggaaggggccgatataccatgggatattccagtggccacaaacaccccaagtggaaaagtgcaagaggatacccacggtcgattcctcctccttggggacccacagaccaacaactgctccctgagcatcagagatgccaggaagggggattcagggaagtactacttccaggtggagagaggaagcaggaaatggaactacatatatgacaagctctctgtgcatgtgacagccctgactcacatgcccaccttctccatcccggggaccctggagtctggccaccccaggaacctgacctgctctgtgccctgggcctgtgaacaggggacgccccccacgatcacctggatgggggcctccgtgtcctccctggaccccactatcactcgctcctcgatgctcagcctcatcccacagccccaggaccatggcaccagcctcacctgtcaggtgaccttgcctggggccggcgtgaccatgaccagggctgtccgactcaacatatcctatcctcctcagaacttgaccatgactgtcttccaaggagatggcacagcatccacaaccttgaggaatggctcggccctttcagtcctggagggccagtccctgcaccttgtctgtgctgtcgacagcaatccccctgccaggctgagctggacctgggggagcctgaccctgagcccctcacagtcctcgaaccttggggtgctggagctgcctcgagtgcatgtgaaggatgaaggggaattcacctgccgagctcagaaccctctaggctcccagcacatttccctgagcctctccctgcaaaacgagtacacaggcaaaatgaggcctatatcaggagtgacgctaggggcattcgggggagctggagccacagccctggtcttcctgtacttctgcatcatcttcgttgtagtgaggtcctgcaggaagaaatcggcaaggccagcagtgggcgtgggggatacaggcatggaggacgcaaacgctgtcaggggctcagcctctcagggacccctgattgaatccccggcagatgacagccccccacaccatgctccgccagccctggccaccccctccccagaggaaggagagatccagtatgcatccctcagcttccacaaagcgaggcctcagtacccacaggaacaggaggccatcggctatgagtactccgagatcaacatccccaagtgagaaactgcagagactcaggcctgtttgagggctcacgacccctgcagcaaagaagcccgagactgattcctttagaattaacagccctccatgctgtgcaacaggacatcagaacttattcctcttgtcaaactgaaaatgcgtgcctgatgaccaaactctccctttctccatccaatcggtccacactccccgcccccggcctctggtacccaccattctcttctctacttctctgaggtcgactattttaggttccaaatatagtgagatcgtagagtg

SEQ ID NO: 132 - DNA, 2130 bp, Homo sapiens
cattgtgttgggcacagctctcactcaccctccggcttcctgtcggggctttctcagccccaccccacgtttggacatttggagcatttccttccctgacagccggacctgggactgggctggggccctggcggatggagacatgctgcccctgctgctgctgcccctgctgtggggggggtccctgcaggagaagccagtgtacgagctgcaagtgcagaagtcggtgacggtgcaggagggcctgtgcgtccttgtgccctgctccttctcttacccctggagatcctggtattcctctcccccactctacgtctactggttccgggacggggagatcccatactacgctgaggttgtggccacaaacaacccagacagaagagtgaagccagagacccagggccgattccgcctccttggggatgtccagaagaagaactgctccctgagcatcggagatgccagaatggaggacacgggaagctatttcttccgcgtggagagaggaagggatgtaaaatatagctaccaacagaataagctgaacttggaggtgacagccctgatagagaaacccgacatccactttctggagcctctggagtccggccgccccacaaggctgagctgcagccttccaggatcctgtgaagcgggaccacctctcacattctcctggacggggaatgccctcagccccctggaccccgagaccacccgctcctcggagctcaccctcacccccaggcccgaggaccatggcaccaacctcacctgtcagatgaaacgccaaggagctcaggtgaccacggagagaactgtccagctcaatgtctcctatgctccacagaccatcaccatcttcaggaacggcatagccctagagatcctgcaaaacacctcataccttccggtcctggagggccaggctctgcggctgctctgtgatgctcccagcaacccccctgcacacctgagctggttccagggctcccctgccctgaacgccacccccatctccaataccgggatcttggagcttcgtcgagtaaggtctgcagaagaaggaggcttcacctgccgcgctcagcacccgctgggcttcctgcaaatttttctgaatctctcagtttactccctcccacagttgctgggcccctcctgctcctgggaggctgagggtctgcactgcagatgctcctttcgagcccggccggccccctccctgtgctggcggcttgaggagaagccgctggaggggaacagcagccagggctcattcaaggtcaactccagctcagctgggccctgggccaacagctccctgatcctccacggggggctcagctccgacctcaaagtcagctgcaaggcctggaacatctatgggtcccagagcggctctgtcctgctgctgcaagggagatcgaacctcgggacaggagtggttcctgcagcccttggtggtgctggtgtcatggccctgctctgtatctgtctgtgcctcatcttctttttaatagtgaaagcccgcaggaagcaagcagctgggagaccagagaaaatggatgatgaagaccccattatgggtaccatcacctcgggttccaggaagaagccctggccagacagccccggagatcaagcatctcctcctggggatgcccctcccttggaagaacaaaaggagctccattatgcctcccttagtttttctgagatgaagtcgagggagcctaaggaccaggaggccccaagcaccacggagtactcggagatcaagacaagcaagtgaggatttgcccagagttcagtcctggctggaggagccacagcctgtctgggggaaaggacaagtcagggaccacttgctgaagcacgaagagcccttgtggcaatgttaacattaactgatgtttaagtgctccaagcagagcagaaagaaaacagatgatggaattagagaggtgggctcaaatctaggccctggcactgtcatcaagcaattcactgcatccctctgtgcctcagtttcccattctgtaaatcagagatcatgcatgctacctcaaaggttgttgtgaacattaaagaaatcaacacatggaaatcaaaaaaaaaaaaaaa

SEQ ID NO: 133 - DNA, 1829 bp, Homo sapiens
gggtctcaaagtttccgtctgctctgtgcagagggagtggagctccgagggcttgtggcttcgcagttcctcttctgtgaacagccgagatcacgcgctcctccccagccacccgttcctccccgcagtccttcccctccactcccttccccttctctgctcatgcagggagcccaggaagcctccgcctcagagatgctaccgctgctgctgcccctgctgtgggcaggggccctggctcaggagcggagattccagctggaggggccagagtcactgacggtgcaggagggtctgtgcgtcctcgtaccctgcagattgcccactacccttccagcctcgtactatggttatggctactggttcctggaaggggctgatgttccagtggccacaaacgacccagacgaagaagtgcaggaggagacccggggccgattccacctcctctgggatcccagaaggaagaactgctccctgagcatcagagatgcccggaggagggacaatgctgcatacttctttcggttgaagtccaaatggatgaaatacggttatacatcttccaagctctctgtgcgtgtgatggccctgacccacaggcccaacatctccatcccagggaccctggagtctggccatcccagcaatctgacctgctctgtgccctgggtctgtgagcaggggacgccccccatcttctcctggatgtcagctgcccccacctccctgggccccaggaccacccagtcctcggtgctcacaatcaccccacggccccaggaccacagcaccaacctcacctgtcaggtgacgttccctggagccggtgtgaccatggagagaaccatccagctcaatgtctcctccttcaaaatcctgcaaaacacctcgtccctccctgtcctggagggccaggctctgcggctgctctgtgatgctgacggcaacccccctgcacacctgagctggttccagggcttccccgccctgaacgccacccccatctccaataccggggtcctggagctgcctcaagtagggtctgcagaagaaggagatttcacctgccgtgctcagcatcctctgggctccctgcaaatctctctgagtctctttgtgcattggaaaccagaaggcagggctggtggtgtcctgggagcagtctggggagctagcatcacaaccctggttttcctctgtgtttgcttcatcttcagagtgaagactagaaggaagaaagcagcccagccagtgcaaaacacggatgatgtgaaccccgtcatggtctcaggctccaggggtcatcagcaccagttccagacaggcatagtttcagaccaccctgctgaggctggccccatctcagaagatgagcaggagctccactacgctgtcctacacttccacaaggtgcaacctcaggaaccaaaggtcaccgacactgagtactcagaaatcaagatacacaagtgaggaattgtccaaagccataaccttgattggagagaacatggtacctctcagtgtattggttactagggctgccacagcaatgtaccacaaaccgagtgacataaacacagaactttattttcgtatagtttcagatgttagaggtctgagaacaaggtgttatcagggttggtcccttctaaggcctctcttgttggcttgtagatggctgtctcctccttgtgtcttcacatggtctttcctctgagtgtgtttgtgtcctaatcttctcttcttataaagacactagtcatattggattagggcctccccatgacctaatttaaataaattaactatttaaagaccctcca

SEQ ID NO: 134 - DNA, 1475 bp, Homo sapiens
gcagttcctgagagaagaaccctgaggaacagacgttccctcgcggccctggcacctccaaccccagatatgctgctgctgctgctgctgcccctgctctgggggagggagagggtggaaggacagaagagtaaccggaaggattactcgctgacgatgcagagttccgtgaccgtgcaagagggcatgtgtgtccatgtgcgctgctccttctcctacccagtggacagccagactgactctgacccagttcatggctactggttccgggcagggaatgatataagctggaaggctccagtggccacaaacaacccagcttgggcagtgcaggaggaaactcgggaccgattccacctccttggggacccacagaccaaaaattgcaccctgagcatcagagatgccagaatgagtgatgcggggagatacttctttcgtatggagaaaggaaatataaaatggaattataaatatgaccagctctctgtgaacgtgacagaccctcctcagaacttgactgtgactgtcttccaaggagaaggcacagcatccacagctctggggaacagctcatctctttcagtcctagagggccagtctctgcgcttggtctgtgctgttgacagcaatccccctgccaggctgagctggacctggaggagtctgaccctgtacccctcacagccctcaaaccctctggtactggagctgcaagtgcacctgggggatgaaggggaattcacctgtcgagctcagaactctctgggttcccagcacgtttccctgaacctctccctgcaacaggagtacacaggcaaaatgaggcctgtatcaggagtgttgctgggggcggtcgggggagctggagccacagccctggtcttcctctccttctgtgtcatcttcattgtagtgaggtcctgcaggaagaaatcggcaaggccagcagcggacgtgggagacataggcatgaaggatgcaaacaccatcaggggctcagcctctcagggtaacctgactgagtcctgggcagatgataacccccgacaccatggcctggctgcccactcctcaggggaggaaagagagatccagtatgcacccctcagctttcataagggggagcctcaggacctatcaggacaagaagccaccaacaatgagtactcagagatcaagatccccaagtaagaaaatgcagaggctcgggcttgtttgagggttcacgacccctccagcaaaggagtctgaggctgattccagtagaattagcagccctcaatgctgtgcaacaagacatcagaacttattcctcttgtctaactgaaaatgcatgcctgatgaccaaactctccctttccccatccaatcggtccacactccccgccctggcctctggtacccaccattctcctctgtacttctctaaggatgactactttagattccgaatatagtgagattgtaacgtg

SEQ ID NO: 135 - DNA, 2967 bp, Homo sapiens
agtttctgagagaagaaccctgaggaacagacgttccctggcggccctggcgccttcaaacccagacatgctgctgctgctgctgctgctgcccctgctctgggggacaaaggggatggagggagacagacaatatggggatggttacttgctgcaagtgcaggagctggtgacggtgcaggagggcctgtgtgtccatgtgccctgctccttctcctacccccaggatggctggactgactctgacccagttcatggctactggttccgggcaggagacagaccataccaagacgctccagtggccacaaacaacccagacagagaagtgcaggcagagacccagggccgattccaactccttggggacatttggagcaacgactgctccctgagcatcagagacgccaggaagagggataaggggtcatatttctttcggctagagagaggaagcatgaaatggagttacaaatcacagttgaattacaaaactaagcagctgtctgtgtttgtgacagccctgacccataggcctgacatcctcatcctagggaccctagagtctggccactccaggaacctgacctgctctgtgccctgggcctgtaagcaggggacaccccccatgatctcctggattggggcctccgtgtcctccccgggccccactactgcccgctcctcagtgctcacccttaccccaaagccccaggaccacggcaccagcctcacctgtcaggtgaccttgcctgggacaggtgtgaccacgaccagtaccgtccgcctcgatgtgtcctaccctccttggaacttgaccatgactgtcttccaaggagatgccacagcatccacagccctgggaaatggctcatctctttcagtccttgagggccagtctctgcgcctggtctgtgctgtcaacagcaatccccctgccaggctgagctggacccgggggagcctgaccctgtgcccctcacggtcctcaaaccctgggctgctggagctgcctcgagtgcacgtgagggatgaaggggaattcacctgccgagctcagaacgctcagggctcccagcacatttccctgagcctctccctgcagaatgagggcacaggcacctcaagacctgtatcacaagtgacactggcagcagtcgggggagctggagccacagccctggccttcctgtccttctgcatcatcttcatcatagtgaggtcctgcaggaagaaatcggcaaggccagcagcgggcgtgggggatacaggcatggaagatgcaaaggccatcaggggctcggcctctcagggacccctgactgaatcctggaaagatggcaaccccctgaagaagcctcccccagctgttgccccctcgtcaggggaggaaggagagctccattatgcaaccctcagcttccataaagtgaagcctcaggacccgcagggacaggaggccactgacagtgaatactcggagatcaagatccacaagcgagaaactgcagagactcaggcctgtttgaggaatcacaacccctccagcaaagaagtcagaggctgattctcatagaacaagaaccctctagagccccatgctatgcagtaggtcaccagggctccctcctcctgtctaaccaaaacttggaccaatgtctcccctttccccggctaccagggacccatccctgcctctagcttctactacccaccattctcctctcgacctctctgaggttgactattttagattccacatagagatgaggtcatgtggtacttgcctctctgtgtgtggctcattttacacaaaaaaatatcccctaggttcatccatgttctctcaaatgacagaatcaagcactgaatatttttttttctttgagagatggagtttcgctctgttgcccaggctggagtgcagtggttcaatctctgctcactgcaacctccacctcctgggttcaaacgattctcctgcctcagcttcccaagtagctggtactacaggcgtgtgtcaccacgcccagctaatttttgtattttttagtagagacggggtttcactataagtgggccaggctagtctcaaactcctgacctcaagtgatctgcctgccttggcctcccaaagtgctgggatttcaggcatgagccaccgcacccagcttgcattgaatattttcaaggagctaaaagaagattttaaatggtctcacaaaaacagataaatatttgcacagatgggtgtgctaatcattgtgccttgatggttccacgatgtatccgggtgtggaaatctcactgggtctctctcaaggccactcggctactcaggacagggctggaatttaaagcctgtccgattctgaggtctcttctctcatctagcactgagtcaagcaatcagcaggctgggcaccccttagccataagttttcaggaaataaattccttgagggcattgacttttacaaaagagggagcagcaatggcctagagtctcaggaacaagacaggtgcactgaggagatgaaggccgggaccccctgcccaacctgtatggcgggtctgtacttattttgtttacccccaatttaaaacgtttttttttattgcaggttgtttgtttgatatggtttggctgtgtccccacccaaatcttatctagaattgtaatcagaattataatccccatgtgttgggggagggacctggtgggaggtgataggatcatgggggtggttcccccatgctgttctgatagtgagtgagttatcacgagatctgatggttttgtaagtggtggtttcccctgctcttctctcttgcctgccaccatgtaagatgtgcctggttccccttccgccatgattgtaagtttcctgaggcctcccccgccatgtggaactgtgagtcaattacacctctttcatttataaattaaaaaaaaaaaaaaaaaaa

SEQ ID NO: 136 - DNA, 1709 bp, Homo sapiens
agttcctgagagaagaaccctgaggaacagacgttccctcgcggccctggcacctctaaccccagacatgctgctgctgctgctgcccctgctctgggggagggagagggcggaaggacagacaagtaaactgctgacgatgcagagttccgtgacggtgcaggaaggcctgtgtgtccatgtgccctgctccttctcctacccctcgcatggctggatttaccctggcccagtagttcatggctactggttccgggaaggggccaatacagaccaggatgctccagtggccacaaacaacccagctcgggcagtgtgggaggagactcgggaccgattccacctccttggggacccacataccaagaattgcaccctgagcatcagagatgccagaagaagtgatgcggggagatacttctttcgtatggagaaaggaagtataaaatggaattataaacatcaccggctctctgtgaatgtgacagccttgacccacaggcccaacatcctcatcccaggcaccctggagtccggctgcccccagaatctgacctgctctgtgccctgggcctgtgagcaggggacaccccctatgatctcctggatagggacctccgtgtcccccctggacccctccaccacccgctcctcggtgctcaccctcatcccacagccccaggaccatggcaccagcctcacctgtcaggtgaccttccctggggccagcgtgaccacgaacaagaccgtccatctcaacgtgtcctacccgcctcagaacttgaccatgactgtcttccaaggagacggcacagtatccacagtcttgggaaatggctcatctctgtcactcccagagggccagtctctgcgcctggtctgtgcagttgatgcagttgacagcaatccccctgccaggctgagcctgagctggagaggcctgaccctgtgcccctcacagccctcaaacccgggggtgctggagctgccttgggtgcacctgagggatgcagctgaattcacctgcagagctcagaaccctctcggctctcagcaggtctacctgaacgtctccctgcagagcaaagccacatcaggagtgactcagggggtggtcgggggagctggagccacagccctggtcttcctgtccttctgcgtcatcttcgttgtagtgaggtcctgcaggaagaaatcggcaaggccagcagcgggcgtgggagatacgggcatagaggatgcaaacgctgtcaggggttcagcctctcaggggcccctgactgaaccttgggcagaagacagtcccccagaccagcctcccccagcttctgcccgctcctcagtgggggaaggagagctccagtatgcatccctcagcttccagatggtgaagccttgggactcgcggggacaggaggccactgacaccgagtactcggagatcaagatccacagatgagaaactgcagagactcaccctgattgagggatcacagcccctccaggcaagggagaagtcagaggctgattcttgtagaattaacagccctcaacgtgatgagctatgataacactatgaattatgtgcagagtgaaaagcacacaggctttagagtcaaagtatctcaaacctgaatccacactgtgccctcccttttatttttttaactaaaagacagacaaattcctaaaaaaaaaaaaaaaaaaaa

SEQ ID NO: 137 - DNA, 2856 bp, Homo sapiens
tagtcgcgggtccccgagtgagcacgccagggagcaggagaccaaacgacgggggtcggagtcagagtcgcagtgggagtccccggaccggagcacgagcctgagcgggagagcgccgctcgcacgcccgtcgccacccgcgtacccggcgcagccagagccaccagcgcagcgctgccatggagcccagcagcaagaagctgacgggtcgcctcatgctggctgtgggaggagcagtgcttggctccctgcagtttggctacaacactggagtcatcaatgccccccagaaggtgatcgaggagttctacaaccagacatgggtccaccgctatggggagagcatcctgcccaccacgctcaccacgctctggtccctctcagtggccatcttttctgttgggggcatgattggctccttctctgtgggccttttcgttaaccgctttggccggcggaattcaatgctgatgatgaacctgctggccttcgtgtccgccgtgctcatgggcttctcgaaactgggcaagtcctttgagatgctgatcctgggccgcttcatcatcggtgtgtactgcggcctgaccacaggcttcgtgcccatgtatgtgggtgaagtgtcacccacagcctttcgtggggccctgggcaccctgcaccagctgggcatcgtcgtcggcatcctcatcgcccaggtgttcggcctggactccatcatgggcaacaaggacctgtggcccctgctgctgagcatcatcttcatcccggccctgctgcagtgcatcgtgctgcccttctgccccgagagtccccgcttcctgctcatcaaccgcaacgaggagaaccgggccaagagtgtgctaaagaagctgcgcgggacagctgacgtgacccatgacctgcaggagatgaaggaagagagtcggcagatgatgcgggagaagaaggtcaccatcctggagctgttccgctcccccgcctaccgccagcccatcctcatcgctgtggtgctgcagctgtcccagcagctgtctggcatcaacgctgtcttctattactccacgagcatcttcgagaaggcgggggtgcagcagcctgtgtatgccaccattggctccggtatcgtcaacacggccttcactgtcgtgtcgctgtttgtggtggagcgagcaggccggcggaccctgcacctcataggcctcgctggcatggcgggttgtgccatactcatgaccatcgcgctagcactgctggagcagctaccctggatgtcctatctgagcatcgtggccatctttggctttgtggccttctttgaagtgggtcctggccccatcccatggttcatcgtggctgaactcttcagccagggtccacgtccagctgccattgccgttgcaggcttctccaactggacctcaaatttcattgtgggcatgtgcttccagtatgtggagcaactgtgtggtccctacgtcttcatcatcttcactgtgctcctggttctgttcttcatcttcacctacttcaaagttcctgagactaaaggccggaccttcgatgagatcgcttccggcttccggcaggggggagccagccaaagtgataagacacccgaggagctgttccatcccctgggggctgattcccaagtgtgagtcgccccagatcaccagcccggcctgctcccagcagccctaaggatctctcaggagcacaggcagctggatgagacttccaaacctgacagatgtcagccgagccgggcctggggctcctttctccagccagcaatgatgtccagaagaatattcaggacttaacggctccaggattttaacaaaagcaagactgttgctcaaatctattcagacaagcaacaggttttataatttttttattactgattttgttatttttatatcagcctgagtctcctgtgcccacatcccaggcttcaccctgaatggttccatgcctgagggtggagactaagccctgtcgagacacttgccttcttcacccagctaatctgtagggctggacctatgtcctaaggacacactaatcgaactatgaactacaaagcttctatcccaggaggtggctatggccacccgttctgctggcctggatctccccactctaggggtcaggctccattaggatttgccccttcccatctcttcctacccaaccactcaaattaatctttctttacctgagaccagttgggagcactggagtgcagggaggagaggggaagggccagtctgggctgccgggttctagtctcctttgcactgagggccacactattaccatgagaagagggcctgtgggagcctgcaaactcactgctcaagaagacatggagactcctgccctgttgtgtatagatgcaagatatttatatatatttttggttgtcaatattaaatacagacactaagttatagtatatctggacaagccaacttgtaaatacaccacctcactcctgttacttacctaaacagatataaatggctggtttttagaaacatggttttgaaatgcttgtggattgagggtaggaggtttggatgggagtgagacagaagtaagtggggttgcaaccactgcaacggcttagacttcgactcaggatccagtcccttacacgtacctctcatcagtgtcctcttgctcaaaaatctgtttgatccctgttacccagagaatatatacattctttatcttgacattcaaggcatttctatcacatatttgatagttggtgttcaaaaaaacactagttttgtgccagccgtgatgctcaggcttgaaatcgcattattttgaatgtgaagggaa

SEQ ID NO: 138 - DNA, 1882 bp, Homo sapiens
agttccgcgcggggctgtcggggaaccatggctgccccgagagacaatgtcactttattattcaagttatactgcttggcagtgatgaccctgatggctgcagtctataccatagctttaagatacacaaggacatcagacaaagaactctacttttcaaccacagccgtgtgtatcacagaagttataaagttattgctaagtgtgggaattttagctaaagaaactggtagtctgggtagattcaaagcatctttaagagaaaatgtcttggggagccccaaggaactgttgaagttaagtgtgccatcgttagtgtatgctgttcagaacaacatggctttcctagctcttagcaatctggatgcagcagtgtaccaggtgacctaccagttgaagattccgtgtactgctttatgcactgttttaatgttaaaccggacactcagcaaattacagtgggtttcagtttttatgctgtgtgctggagttacgcttgtacagtggaaaccagcccaagctacaaaagtggtggtggaacaaaatccattattagggtttggcgctatagctattgctgtattgtgctcaggatttgcaggagtatattttgaaaaagttttaaagagttcagatacttctctttgggtgagaaacattcaaatgtatctatcagggattattgtgacattagctggcgtctacttgtcagatggagctgaaattaaagaaaaaggatttttctatggttacacatattatgtctggtttgtcatctttcttgcaagtgttggtggcctctacacttctgttgtggttaagtacacagacaacatcatgaaaggcttttctgcagcagcggccattgtcctttccaccattgcttcagtaatgctgtttggattacagataacactcacctttgccctgggtactcttcttgtatgtgtttccatatatctctatggattacccagacaagacactacatccatccaacaaggagaaacagcttcaaaggagagagttattggtgtgtgattttagcctcacgtgagactccttttaagactaaaccatttgcattaaactagagccttaagtcaatctcagaaggtagcataaacaaataaaaattaactgtatggcatgatcagtgcggttatgtggaaacaacaacaaacaaacgaagctatctgagtgaactgctaatacagaaacttaatgtagacctgtttggggtctactattgttttagaatgaaggaattgtattattgtgtgtatatataatttgtaaataaaaagtatggagatgatacggtgttaaaaaaaatcatggtgaggctacaatactcaagtaacaaggtttgggacaatgtctaagggttaaagtgccaaagccatttctgtactaactgttctcttgttccggtaccggggagaaggatgacccctccttattctccaattcatgtacagtattttgtcctagcagcataaagacctagctcttttcttacaagaggcagaaacaagacaggctagttcataaacaaactgaatgtgtaactaacttctcaaaatgaatctatttcataactcggacaatttctgggtggtgactgagtacccctttagtgagtacccctttagtgctatatttgtgccattcattatctggttcatatttctttgctgttagatgatacacatttcttcaaaaaaatttctaatgtcacttttgtacttttttaaataaagtatgtttaactgttgggctctcaataatttgtgaaatttcagtgttttctataatgttaatggggaaattcagcaataaactttatttgcaaaaaaaaaaaaaaaaaaaaaaaaaaaaa

SEQ ID NO: 139 - DNA, 1451 bp, Homo sapiens
caacatggcagcggttggggctggtggttccaccgcggcgcccgggccaggggcggtttccgcgggtgcattggagccggggaccgccagtgcggctcacaggcgcctgaagtacatatccctagctgtgctggtggtccagaatgcctccctcatcctcagcatccgctacgcccgcacgttgccaggggaccgcttctttgccaccactgctgtggtcatggcggaagtgctcaaaggtctcacctgcctgctgctgctcttcgcacagaagaggggtaacgtgaagcacctggttctcttcctccatgaggctgtcctggtgcagtatgtggacacgctcaagctcgcagtgccctctctcatctacaccttgcagaataacctccagtatgttgccatctctaacctaccagctgccactttccaggtgacataccagctgaagatcctgaccacagcgctgttctccgtgctcatgctgaatcgcagcctttcccggctgcagtgggcctccctgctgctcctcttcactggcgtcgccattgtccaggcacagcaagccggtgggggaggcccacggccactggatcagaaccctggggcaggcctggcagccgtcgtggcctcctgtctctcctccggcttcgcaggtgtctactttgagaagatcctcaaaggcagctcaggctccgtgtggctgcgcaacctgcaactgggcctcttcggcacagcactgggcctggtggggctctggtgggctgagggtaccgccgtggccacccgtggtttcttttttgggtacacacctgctgtctggggcgtggtgctcaaccaggccttcggcgggctactggtggctgtggttgtcaagtacgctgacaatatcctcaagggctttgccacctccctgtccattgtgctgtccactgttgcctccattcgcctctttggcttccacgtggacccattatttgcccttggcgctggactcgtcattggtgctgtctacctctacagccttccccgaggtgcagccaaagccatagcctctgcctctgcctccgcctccgggccctgcgttcaccagcagcctcccgggcagccaccaccaccgcagctgtcttcccaccgtggagacctcatcacggagccctttctgccaaagttgctcaccaaggtgaagggttcctagccgctgggattgaagacattggcctggcctcgttctctcttcttgcccttggcccagctgggaccaaactctgatcagtattaggggtagagtgaggtagacactggactccctgtccccaccacccctgccccacccagggccaacatgactaagctctctcatgacccacctcagctcagccccccagcccctgccagctccacactatctcttagctgagtttttgcaaataaaatgtgttgtgtatcttgcc

SEQ ID NO: 140 - DNA, 2149 bp, Homo sapiens
ccgcgggaacccggaaacgcctgggctgcaccgagctggcggtggctacggcgacgggagccggcggcgctgcgggtcagcggtcgcgtaggacccagcggactcggcagcctggggcgcccggcggagctgaaccgcggcccccggtggtgggctcagccggtcgagctgcgcgggaggcaaatgaagataaaacaatgttcgccaacctaaaatacgtttccctgggaattttggtctttcagactaccagtttggttctaacaatgcgttattccagaactttaaaagaagaaggacctcgttatctatcttctacagcagtggttgttgctgaacttttgaagataatggcctgcattttattggtctacaaagacagcaaatgtagtctaagagcactgaatcgagtactacatgatgaaattcttaataaacctatggaaacacttaaacttgctattccatcagggatctatactcttcagaataatttactgtatgtggcactatcaaatctagatgcagctacttatcaggtcacgtatcagttaaaaattcttacaacagcattattttctgtgtctatgcttagtaaaaaattgggtgtataccagtggctgtccctagtaattttgatgacaggagttgcttttgtacagtggccctcagattctcagcttgattctaaggaactttcagctggttctcaatttgtaggactcatggcagttctcacagcatgtttttcaagtggctttgctggggtttactttgagaaaatcttaaaagaaacaaaacaatcagtgtggataagaaatattcagcttggtttctttggaagtatatttggattaatgggtgtatacatttatgatggagaactggtatcaaagaatggattttttcagggatataaccgactgacctggatagtagttgttcttcaggcacttggaggccttgtaatagctgctgttattaagtatgcagataatattttaaaaggatttgcaacctctttatcgataatattatcaacattgatctcctatttttggcttcaagattttgtgccaaccagtgtctttttccttggagccatccttgtaataacagctacttttttgtatggttatgatcccaaacctgcaggaaatcccactaaagcatagttgtatactatctttaactggtttttcacgatggggcactaggaatctcgacattaatcttgcacagaggacttctacagagtctgagaagatatcatcatgctgaatctgatcatactgttttttaaaagtttaaggataagacatgtgtatatgtaacaaaacacattgcatctagaaatcaaaacttgaaagtatttccagggattaggattagaaggaatattagaggaaacttgaaatctgagtttaaaaagattttacctttttgattgctgcagaaatgtcctatgcactctttgcaagagcacacaacaaatgtcagataccaatttttgcaaattagatttaatcttattaaatgtttttatcttactctttctgtacagatatatcaaatcacatgaaatatttaaagtttgaaaattataattacctataaagctgtgaaaaatagaagtataatttgaaaaaacatttcacttatcagagatttttatatttatacaaaagattactaaatgaaggattgctaaatgtttttggttcaattacataaaaattaatattctgggtctgatctgtcagagaataaatatcaaatctaaatttaatgtagagatacatactatttctccatatgaattttaagatattttagtgcttcaagactgctgaaagcaatccagttgctcctgtgctagatggtagccagagaattttatagtaatggaggttagcccttaatctcttcattgcatttcatttctgtaaatcagattaagtccttaatattattttaaattaaaatttgtgtgtaattgccattaaattttcaaaatgtaatttaaaaggattaaatactcatttaataatttaaaataattattgtataatatctacatttggagaattttgaactatcaagcatatactgtatacagttagaaagttattaaatgaacattttactc

SEQ ID NO: 141 - DNA, 1272 bp, Homo sapiens
cccgccgccaggccaccgctgctgcggcagccatggcggaagttcatagacgtcagcatgctcgggttaaaggagaagcccccgcgaaatcctccacactccgagatgaggaggagctggggatggcgtcggccgaaacgctgaccgtgtttctgaagctgctggccgccggcttttacggcgtgagctccttcctgatcgtggtggtgaataagagcgtgctcaccaattacagatttccctcctcactatgtgttggacttggccagatggtggccacagtggcagttctctgggtgggaaaggcgctcagagtagtcaagtttcctgaccttgacagaaatgtacctcgaaagacgtttccactacctctactatattttgggaaccaaatcacgggactgttcagcacaaagaaactgaacttgccaatgtttacagttctgagaaggttctccatcctgtttacaatgtttgctgaaggagttttactcaagaagactttttcttggggtattaaaatgactgtatttgcaatgattattggagcctttgtagctgccagctctgacttggcatttgatctggaaggatatgcttttattctgataaacgatgtcctaacagcagcaaatggtgcatacgtaaaacaaaaattagattcaaaagagctgggaaaatatggactgctctattacaatgcactgttcatgattctgcccaccctggccattgcgtatttcacaggagatgcacaaaaggctgtggagtttgaaggctgggctgacaccctctttcttctgcagttcaccctctcctgtgtgatggggtttatcttaatgtacgccacagtactctgcacgcagtataattctgctcttacaactacaatagttggctgtattaagaatatattaataacttatattggaatggtctttggtggagattatattttcacgtggacaaacttcattggtttaaatatcagcattgctgggagcctggtatattcctatatcactttcactgaagagcagctgagcaaacagtcagaggctaataacaagctggacattaaggggaaaggagcagtgtgaccagaggattgcttcatctgatacgtaggcctaagtttttaatcaactcagaacactggcagttcctacagagacactgaggtgtcttgattatggaggaaataaccattcctttgcacttgtacaatctgaggattgattgctgccttttaaaattttatgaagagagaaa

SEQ ID NO: 142 - DNA, 2911 bp, Homo sapiens
ctccagcctccgccggcggagcccactatgccagacagtttcgacactttgcaaagacaaagagccctagaccggagggaggaggaggaggaagaagagcggagagagaaggaagaggcgatgtgagctgggaagggggcaagtgtccgggacacccacacccctgtattctcctccgaaccccttcatgcccaaatcccggaaactccagcgtgtctccagccgtgttggtaccattttcagatttcatcttcctaaactggaaatgtcaatgagaggaaattaacacccccaagagctgcagtgagcaaatgcattgagcttgggtcaggacaattccatttggggaccagagatggacggtcactcagcctatggagatgaagaaactgaggttcagagaggttaagagactccactgaggtcacacagccgatgacagacaaccttctgtgccttcatcaagctggttgtgtacccaccatgtccctggcgacaggatgggaaagaaaaagccctaattaaggatcgtcagaaaccacagttggaggaggacggcagagacagtttccctccccgctataccaacacccttccttcgaggtcctcgctcctgagggaccctggactgtcacagagattaatgaccccttatcttctttggatgtgaaaggaaatcactggttaaagcttgatcgagagacattatcagctctttaaggattgcagaagaataggctactttattttctgaaaaggtaaatatatgcaagcaaagccaacatgccacgaatggcgttggtctaccacacagccgtgtctgggacacagttgggggtcatcccccagcaggagtgaagtcgagcttagcggcccttgtgtcctcccttggaattcctgccatcccttttgattgagcctccacctctgggatttttcttccatttttctcctctcttaggagggagttcctgctacccatcgtgggaggccaccatcaggactgcgaagatggtgaccctgcggaagaggaccctgaaagtgctcaccttcctcgtgctcttcatcttcctcacctccttcttcctgaactactcccacaccatggtggccaccacctggttccccaagcagatggtcctggagctctccgagaacctgaagagactgatcaagcacaggccttgcacctgcacccactgcatcgggcagcgcaagctctcggcctggttcgatgagaggttcaaccagaccatgcagccgctgctgaccgcccagaacgcgctcttggaggacgacacctaccgatggtggctgaggctccagcgggagaagaagcccaataacttgaatgacaccatcaaggagctgttcagagtggtgcctgggaatgtggaccctatgctggagaagaggtcggtgggctgccggcgctgcgccgttgtgggcaactcgggcaacctgagggagtcttcttatgggcctgagatagacagtcacgactttgtcctcaggatgaacaaggcgcccacggcagggtttgaagctgatgttgggaccaagaccacccaccatctggtgtaccctgagagcttccgggagctgggagataatgtcagcatgatcctggtgcccttcaagaccatcgacttggagtgggtggtgagcgccatcaccacgggcaccatttcccacacctacatcccggttcctgcaaagatcagagtgaaacaggataagatcctgatctaccacccagccttcatcaagtatgtctttgacaactggctgcaagggcacgggcgatacccatctaccggcatcctctcggtcatcttctcaatgcatgtctgcgatgaggtggacttgtacggcttcggggcagacagcaaagggaactggcaccactactgggagaacaacccatccgcgggggcttttcgcaagacgggggtgcacgatgcagactttgagtctaacgtgacggccaccttggcctccatcaataaaatccggatcttcaaggggagatgacgcagtgaagggctgaggatggacgcactgtcacacctctgcatttccagccccagcatcttgctggagccgttccatcccggagcttggaggggcagcctcaggtgtgtgcctgggcaccgctcacagcctcttgcacccagccgttggcagcatctactcagcaaggtcactaagctctgccagcgtggcagagcatgtcttggaacctgtcttgagtggggacaacgtccccccactgctgccctagagctggggagacgctgggaaaggttcaacctccacacactaaaatcattttggctcctggggcaagcttggggaatgaatgtggaagatgcctatattctgagagacaggacagtttcccaggaagatgggcagagacttgagtggcgattacctccagcacagagacgtgccaggcggtgttggcgctcggggcgagatgctgcccttctttgcacgaagcctggcctcttgcttggcgtgataaccctgtcatcttcccaaagctcatttatgagccaccagaggctcctaccccaaagattttcacagaaacttgaggccaggtgccgtggctcacacctgtaatctgaacactttgggaggccgaggcgggaggatcacttgagcccaggagttcaagaccagcctgggcaacatagtgagactcctgtctctacaaaaataaaagatttaaaaaaattagccaggcacggtggcacacacttgtagccccagctactagggaggctgaggagggaggatctcttgtgcctaggagttcgaggctgcagtgggctgtgatcacaccactgcactccagcctgggcaacagagtgagaccctgtctctgaaaaaaaaaaaaaaa

SEQ ID NO: 143 - DNA, 2479 bp, Homo sapiens
cgggcggacgagagagctgcgagctaacgggtccggacgacggcggcggcggcggcggcggcggcgacggctttctgcgcgggcggcggcggcggccggagcggcgagcatggcccgcgcggcgccgggcgctgactgagggtcgtgctgcggcagcctggcgcccgacatgtgaaggggaacctgccaggggattactgtgagctcacagcaggataggctggccccgggggagtggggatgggcagaacctgggccaggagtattaggaaggagacctggaccctggtagggagctcagcacaagctcgcctgacccagatggtattggacacagtgccccgctgaacagcagctgttcccagcgccagaggaccccacagccacagtaggagctttgcgacccctacgcaactgcagctggggctggggccaccaggagaagggaccagcacctcagatgggaagcagaagggcaagacctactgcggaaaggatctcgatctctgcagcggagttttcccacactcacagagcttcctgtttttgtcctctcagggttggggtctggctcccctcctctggcagaggttttgggccaggaggtgggacaacacttgcatggaacccaagtcccctgaagcccctgtgctctctgttgtgattggagttctagggcttccccgctgccgggaacgaggggccgcctcattgtctgctcatgaaccacaaggaccccgactgctccagactggattatttcaagccgccaaagagggggacccctagagctggcagccagcaatcccaagggactagagggctgcaatggactgacctccccctcaccagggtggcaggagaggcagagcctctgtggcctagctagtgacggagagacccgatgaagccctaagcaggggccccgcctgactcagggacaggacagccactcctgccaacgtgtgttctccctacatgagggagggcgtggcaagggacccctgccactgtcccctgctgcagcacgtgcccctatgccctttgcatgtggtgccagaataggcaggctacgccgtggctggcccctcagcgggctgggaaaagagtggccacggtgaccgtcacccgcctgccggcaccatgaagtgctccctgcgggtgtggttcctctccgtggccttcctgctggtgttcatcatgtccctgctcttcacctactcgcaccacagcatggccacgctcccctacctggactcaggggccctggatgggacgcaccgggtgaagctggtgcccggctatgccggcctgcagcgcctcagcaaggagaggctctcgggcaagagctgtgcctgtcgccgctgcatgggcgatgccggtgcctccgactggtttgacagccactttgacggtaacatttcccccgtctggacccgagagaacatggatcttccaccggacgtccagaggtggtggatgatgctgcagccccagttcaagtcacacaacaccaatgaggtgctggagaagctgttccagatagtgcctggcgagaacccctaccgcttccgggacccccaccagtgccggcgctgtgccgtggtggggaactcgggcaacctgcggggctctggctatgggcaggacgtggacgggcacaacttcatcatgaggatgaatcaggcgccaaccgtgggctttgagcaggatgttggcagccgaaccacccaccatttcatgtaccctgagagtgccaagaacctgcccgccaacgtcagcttcgtgctggtgcccttcaaggtcctggaccttctgtggatcgccagcgccttgtccacggggcagatccgattcacctacgccccagtgaagtccttccttcgagtggataaagaaaaggtccagatctacaacccagccttcttcaagtatatccacgacaggtggacagagcatcacgggcggtacccttccacggggatgctggtgcttttctttgccctgcatgtgtgtgatgaggtgaacgtgtacgggttcggggccgacagccggggcaactggcaccactactgggagaacaaccggtacgcgggcgagttccggaagactggcgtgcacgacgcggacttcgaggcccacatcatcgacatgctggccaaggccagcaagatcgaagtctaccggggcaactgagccgggcctcgccgcgacccttccggcccatctatcgggcaccggggctccggcccgggacccaggaccagcaacccgcgaccaatcatgctgcagcccaggggcgtctgctgtgccccgccaatcacgagactgggggaccggccgggcctggcaccaatctgcgctgcggtcgggcggagcttctgtttctcccagccaatcatgtgactcaaggaaaacttccggcgctgtgtccagtctcctccaatcaatggccttcgggggcgggccagcggccgct

SEQ ID NO: 144 - DNA, 2271 bp, Homo sapiens
actatggcggcgcccatgcagcccagcgcgttgtgggctcccgccggggtcccccgcggctgtcgccgccgcctacgccgctgcctccgccttcctgccccgcgtcgggccgggcgccacctcccccctgcctccctctccgctgtggtcatttaggaaatcgtaaatcatgtgaagatgggactcttggtatttgtgcgcaatctgctgctagccctctgcctctttctggtactgggatttttgtattattctgcgtggaagctacacttactccagtgggaggaggactccaattcagtggttctttcctttgactccgctggacaaacactaggctcagagtatgatcggttgggcttcctcctgaatctggactctaaactgcctgctgaattagccaccaagtacgcaaacttttcagagggagcttgcaagcctggctatgcttcagccttgatgacggccatcttcccccggttctccaagccagcacccatgttcctggatgactcctttcgcaagtgggctagaatccgggagttcgtgccgccttttgggatcaaaggtcaagacaatctgatcaaagccatcttgtcagtcaccaaagagtaccgcctgacccctgccttggacagcctccgctgccgccgctgcatcatcgtgggcaatggaggcgttcttgccaacaagtctctggggtcacgaattgacgactatgacattgtggtgagactgaattcagcaccagtgaaaggctttgagaaggacgtgggcagcaaaacgacactgcgcatcacctaccccgagggcgccatgcagcggcctgagcagtacgagcgcgattctctctttgtcctcgccggcttcaagtggcaggactttaagtggttgaaatacatcgtctacaaggagagagtgagtgcatcggatggcttctggaaatctgtggccactcgagtgcccaaggagccccctgagattcgaatcctcaacccatatttcatccaggaggccgccttcaccctcattggcctgcccttcaacaatggcctcatgggccgggggaacatccctacccttggcagtgtggcagtgaccatggcactacacggctgtgacgaggtggcagtcgcaggatttggctatgacatgagcacacccaacgcacccctgcactactatgagaccgttcgcatggcagccatcaaagagtcctggacgcacaatatccagcgagagaaagagtttctgcggaagctggtgaaagctcgcgtcatcactgatctaagcagtggcatctgagtgggcccagcacatggccatagaggcccaggcaccaccaggagcagcagccagcaccacctacacaggagtcttcagacccagagaaggacggtgccaagggccccaggggcagcaaggccttggtggagcagccagagctgtgcctgctcagcagccagtctcagagaccagcactcagcctcattcagcatgggtccttgatgccagagggccagcaggctcctggctgtgcccagcaggcccagcatgcaggtggtgggacactgggcagcaaggctgctgccggaatcacttctccaatcagtgtttggtgtattatcattttgtgaatttgggtaggggggagggtagggataatttatttttaaataaggttggagatgtcaagttgggttcacttgccatgcaggaagaggcccactagagggcccatcaggcagtgttacctgttagctccctgtggggcaggagtgccaggaccagcctgtaccttgctgtggggctacaggatggtgggcaggatctcaagccagccccctccagctcatgacactgtttggcctttcttggggagaaggcggggtattcccactcaccagccctagctgtcccatggggaaaccctggagccatcccttcggagccaacaagaccgccccagggctatagcagaaagaactttaaagctcaggagggtgacgcccagctccgcctgctgggaagagctcccctccacagctgcagctgatccataggactaccgcaggcccggactcaccaacttgccacatgttctaggtttcagcaacaagactgccaggtggttgggttctgcctttagcctggaccaaagggaagtgaggcccaaggagcttacccaagctgtggcagccgtcccaggccacccccatggaagcaataaagctcttccctgaaaaaaaaaaaaaaaaaaaaaaaaaaaaa

SEQ ID NO: 145 - DNA, 1766 bp, Homo sapiens
cggtcaggtccagcacttgggagctgactgtgctggaggtgacaggctttgcggggtccgcctgtgtgcaggagtcgcaaggtcgctgagcaggacccaaaggtggcccgaggcagccgggatgacagctctccccaggaatcctgctgcctgctgagaaacatggtcagcaagtcccgctggaagctcctggccatgttggctctggtcctggtcgtcatggtgtggtattccatctcccgggaagacagtttttattttcccatcccagagaagaaggagccgtgcctccagggtgaggcagagagcaaggcctctaagctctttggcaactactcccgggatcagcccatcttcctgcggcttgaggattatttctgggtcaagacgccatctgcttacgagctgccctatgggaccaaggggagtgaggatctgctcctccgggtgctagccatcaccagctcctccatccccaagaacatccagagcctcaggtgccgccgctgtgtggtcgtggggaacgggcaccggctgcggaacagctcactgggagatgccatcaacaagtacgatgtggtcatcagattgaacaatgccccagtggctggctatgagggtgacgtgggctccaagaccaccatgcgtctcttctaccctgaatctgcccacttcgaccccaaagtagaaaacaacccagacacactcctcgtcctggtagctttcaaggcaatggacttccactggattgagaccatcctgagtgataagaagcgggtgcgaaagggtttctggaaacagcctcccctcatctgggatgtcaatcctaaacagattcggattctcaaccccttcttcatggagattgcagctgacaaactgctgagcctgccaatgcaacagccacggaagattaagcagaagcccaccacgggcctgttggccatcacgctggccctccacctctgtgacttggtgcacattgccggctttggctacccagacgcctacaacaagaagcagaccattcactactatgagcagatcacgctcaagtccatggcggggtcaggccataatgtctcccaagaggccctggccattaagcggatgctggagatgggagctatcaagaacctcacgtccttctgacctgggcaagagctgtagcctgtcggttgcctactctgctgtctgggtgacccccatgcgtggctgtgggggtggctggtgccagtatgacccacttggactcaccccctcttggggagggagttctgggcctggccaggtctgagatgaggccatgcccctggctgctcttatggagccgagatccagtcagggtgggggcgctggagccgtgggagcccggccagggcagggggctcgtcgctgtggcaccccctctctgccagcaccaagagattatttaatgggctatttaattaaggggtaggaaggtgctgtgggctggtcccacacatccaggaaagaggccagtagagaattctgcccactttttataaaaacttacagcgatggccccaccaaggcctagacacggcactggcctcccaggagggcaggggcattgggaatgggtgggtgccctccagagaggggctgctacctcccagcaggcatgggaagagcactggtgtgggggttccaccgagaaggggacctcatctagaaaagaggttacaaacctaccattaaactatttttcctaaaacggaaaaaaaaaaaaaaaaaaaaaaaaa

SEQ ID NO: 146 - DNA, 2397 bp, Homo sapiens
cacgcgcccctcctccgcatctgagcgggggagcggcggcccccagctgaatgggcgcgagagcggcgctgggggcgggtgggggcgcggggtaccgggctggcggccggccggcgccccctcattagtatgcggacgaaggcggcgggctgcgcggagcggcgtcccctgcagccgcggaccgaggcagcggcggcacctgccggccgagcaatgccaagtgagtacacctatgtgaaactgagaagtgattgctcgaggccttccctgcaatggtacacccgagctcaaagcaagatgagaaggcccagcttgttattaaaagacatcctcaaatgtacattgcttgtgtttggagtgtggatcctttatatcctcaagttaaattatactactgaagaatgtgacatgaaaaaaatgcattatgtggaccctgaccatgtaaagagagctcagaaatatgctcagcaagtcttgcagaaggaatgtcgtcccaagtttgccaagacatcaatggcgctgttatttgagcacaggtatagcgtggacttactcccttttgtgcagaaggcccccaaagacagtgaagctgagtccaagtacgatcctccttttgggttccggaagttctccagtaaagtccagaccctcttggaactcttgccagagcacgacctccctgaacacttgaaagccaagacctgtcggcgctgtgtggttattggaagcggaggaatactgcacggattagaactgggccacaccctgaaccagttcgatgttgtgataaggttaaacagtgcaccagttgagggatattcagaacatgttggaaataaaactactataaggatgacttatccagagggcgcaccactgtctgaccttgaatattattccaatgacttatttgttgctgttttatttaagagtgttgatttcaactggcttcaagcaatggtaaaaaaggaaaccctgccattctgggtacgactcttcttttggaagcaggtggcagaaaaaatcccactgcagccaaaacatttcaggattttgaatccagttatcatcaaagagactgcctttgacatccttcagtactcagagcctcagtcaaggttctggggccgagataagaacgtccccacaatcggtgtcattgccgttgtcttagccacacatctgtgcgatgaagtcagtttggcgggttttggatatgacctcaatcaacccagaacacctttgcactacttcgacagtcaatgcatggctgctatgaactttcagaccatgcataatgtgacaacggaaaccaagttcctcttaaagctggtcaaagagggagtggtgaaagatctcagtggaggcattgatcgtgaattttgaacacagaaaacctcagttgaaaatgcaactctaactctgagagctgtttttgacagccttcttgatgtatttctccatcctgcagatactttgaagtgcagctcatgtttttaacttttaatttaaaaacacaaaaaaaattttagctcttcccactttttttttcctatttatttgaggtcagtgtttgtttttgcacaccattttgtaaatgaaacttaagaattgaattggaaagacttctcaaagagaattgtatgtaacgatgttgtattgatttttaagaaagtaatttaatttgtaaaacttctgctcgtttacactgcacattgaatacaggtaactaattggaaggagaggggaggtcactcttttgatggtggccctgaacctcattctggttccctgctgcgctgcttggtgtgacccacggaggatccactcccaggatgacgtgctccgtagctctgctgctgatactgggtctgcgatgcagcggcgtgaggcctgggctggttggagaaggtcacaacccttctctgttggtctgccttctgctgaaagactcgagaaccaaccagggaagctgtcctggaggtccctggtcggagagggacatagaatctgtgacctctgacaactgtgaagccaccctgggctacagaaaccacagtcttcccagcaattattacaattcttgaattccttggggattttttactgccctttcaaagcacttaagtgttagatctaacgtgttccagtgtctgtctgaggtgacttaaaaaatcagaacaaaacttctattatccagagtcatgggagagtacaccctttccaggaataatgttttgggaaacactgaaatgaaatcttcccagtattataaattgtgtatttaaaaaaaagaaacttttctgaatgcctacctggcggtgtataccaggcagtgtgccagtttaaaaagatgaaaaagaataaaaacttttgaggaacaaaaaaaaaaaaaaa

SEQ ID NO: 147 - DNA, 2107 bp, Homo sapiens
gagcctgagactccgggcagggctgctccctcctctgctcccccgccagatccgcggggaaggaatcgtgcccgcgccgcccctggcccgcgccaccttcctttggtttctgccggcctcgggcttctgcggcccgatgtggcaggcgccgcgagagaggcagcagccggctggagcagcggcccctcaggtctcggagcccggtgcgcctctgcggtcgtcgctcctgggcctcggcgggtcactcttgccggccggcttcgctgcgggtttgcactgcccggcatttgcaagtgaggaagcagcacaaccctgggttttagataatttctaacagagaggccccagcaattcagcaggcagcgtcctgagtctttggcagcctggtccctctttcgcaaattctccacctttgcgaacagagggtctttaggacacagattcttaaaagtgcaggtgagccagccatgagagggtatcttgtggccatattcctgagtgctgtcttcctctattatgtactgcattgcatattatggggaacgaatgtctattgggtggcacctgtggaaatgaaacggagaaataagatccagccttgtttatcaaagccagcttttgcctctctgctgaggtttcatcagtttcacccttttctgtgtgcggctgattttagaaagattgcttccttgtatggtagcgataagtttgatttgccctatgggatgagaacatcagcggaatattttcgacttgctctttcaaaactgcagagttgtgatctctttgatgagtttgacaacataccctgtaaaaagtgtgtggtggttggtaatggaggagttttgaagaataagacattaggagaaaaaatcgactcctatgatgtaataataagaatgaataatggtcctgttttaggacatgaagaagaagttgggagaaggacaaccttccgacttttttatccagaatctgttttttcagatcctattcacaatgaccctaatacgacagtgattctcactgcttttaagccacatgatttaaggtggctgttggaattgttgatgggtgacaaaataaacactaatggtttttggaagaaaccagccttaaacctgatttataaaccttatcaaatccgaatattagatcctttcattatcagaacagcagcttatgaactgcttcattttccaaaagtgtttcccaaaaatcagaaacctaaacacccaacaacaggaattattgccatcacattggcgttttacatatgtcacgaagttcacctagctggttttaaatacaacttttctgacctcaagagtcctttgcactactatgggaatgccaccatgtctttgatgaataagaacgcgtatcacaatgtgactgcagagcagctctttttgaaggacattatagaaaaaaacctcgtaatcaacttgactcaagattgactctacagactcagaagatgatgctaacagtgttagttttatttttgtactgcaatttttagtttaaaatatgttggatgcactcgtcaaataattatgtatactgtctgttgctgcctggtgattcataaccaccagcttaatttctgtgaatactgtatatttaacttatgaaaaccaagaaatgtaaagataacaggaaaataagttttgattgcaatgtttttaaaataagctagttttctgaggtgttttcacacgtctttttatagttacttcatcttagatttttgaagggatatgacttcctactaaggatttagtttaccacaacaattctgactacaataagacattttgaggaggatatttggctactgtaaacatggctggtggaaaatcacgattgtggcttgatgtggcaagccgaaaccacttggctctggaaatctaagttcatactggtttaattaagctctctcctgacaacccccagaattaaatgaaccatgattgtgaagagtaatttggtacaatgaaggcagtgtttgtttttaagttaaaggaaatgggctaaacataaagttcttattagataagtaaataactaaagaaagaatacaattactaaaaaaaaaaaaaaa

SEQ ID NO: 148 - DNA, 4295 bp, Homo sapiens
gaggaggttcctgtagggcggcacaaccagggagggcgtggaagctctgcatcccttctcccataccttgctctacacatctcttcatctgtatcctctgcagcatccttgatgataaaccagtaaatatgagttttgatcatcctgagaaaaatgggccttggcctgcagacccaataaaccttccctcccatggataatagtgctaattcctgaggacctgaagggcctgccgcccctgggggattagccagaagcaggcttgttttcctgctcagaacaaagtgacttccctgaacacatcttcattatgattcacaccaacctgaagaaaaagttcagctgctgcgtcctggtctttcttctgtttgcagtcatctgtgtgtggaaggaaaagaagaaagggagttactatgattcctttaaattgcaaaccaaggaattccaggtgttaaagagtctggggaaattggccatggggtctgattcccagtctgtatcctcaagcagcacccaggacccccacaggggccgccagaccctcggcagtctcagaggcctagccaaggccaaaccagaggcctccttccaggtgtggaacaaggacagctcttccaaaaaccttatccctaggctgcaaaagatctggaagaattacctaagcatgaacaagtacaaagtgtcctacaaggggccaggaccaggcatcaagttcagtgcagaggccctgcgctgccacctccgggaccatgtgaatgtatccatggtagaggtcacagattttcccttcaatacctctgaatgggagggttatctgcccaaggagagcattaggaccaaggctgggccttggggcaggtgtgctgttgtgtcgtcagcgggatctctgaagtcctcccaactaggcagagaaatcgatgatcatgacgcagtcctgaggtttaatggggcacccacagccaacttccaacaagatgtgggcacaaaaactaccattcgcctgatgaactctcagttggttaccacagagaagcgcttcctcaaagacagtttgtacaatgaaggaatcctaattgtatgggacccatctgtataccactcagatatcccaaagtggtaccagaatccggattataatttctttaacaactacaagacttatcgtaagctgcaccccaatcagcccttttacatcctcaagccccagatgccttgggagctatgggacattcttcaagaaatctccccagaagagattcagccaaaccccccatcctctgggatgcttggtatcatcatcatgatgacgctgtgtgaccaggtggatatttatgagttcctcccatccaagcgcaagactgacgtgtgctactactaccagaagttcttcgatagtgcctgcacgatgggtgcctaccacccgctgctctatgagaagaatttggtgaagcatctcaaccagggcacagatgaggacatctacctgcttggaaaagccacactgcctggcttccggaccattcactgctaagcacaggctcctcactcttctccatcaggcattaaatgaatggtctcttggccaccccagcctgggaagaacattttcctgaacaattccagcctgctccttttactctaggggcctctgtcagcaagaccatggggacttcaagagcctgtggtcaggaaatcaggtccagccttccctgtagccagacagtttatgagcccagagcctcctgccacacacatgcacacatatctagcattctttccagacagcatcctccccgccttccaccttggtagatgcaaggtctatctctcccatcagggctgccaaagctgggctttgtttttcccagcagaatgatgccattctcacaaaccaatgctctatattgcttgaagtctgcatctaaatattgatttcacgttttaaagaaattctcttaaattacaattgtgcccaatgcagggtggctctggggggcaagtaggtggtacaggggattggaaacatgctccgcgcctccagagaaaagttgctcccgaggtccatgcccctggaacgtgttcctatcactctggctggttgggctggtccttagactgggtgcttatgattaaagggtcttggttagcccactttccctctccatgtggagatggaaggtagagaaggatacagtgtctatcctcaagttgctacggttcagtgagagaggcagacatctgaacaggcaggtaggattcagtgtgctcagtgcactggggatttggagagagatgggcttgctctctctgtgcacccaggagggccacgcacttaaaactgtgtttgtggatcagagaaggctttatagcacagggggcattcagatgagtcttagaggaagagaagaaacatggcaagcagattacatctgagccgtttgaattgtgtttttctttcttcccatgtttattttctaagatctacctgaacttagagactcaagatatttttttaggaaacctcctacccatgtctgaggtagcaagtgcagcctcacgacagataccaggcaatccagagccacaaaacgtgattcctccaggctctgcctggcctgaccctgtcctgtcagctgggtttacataccagtcccattcttccttttcaatacctacccccaaatcttctcctaaccaccatctgttttttttttttaaagcattttttgctttaaaagcatcctgaccccaatttctttgagctcacgggccttttgctgaaggtctctcagggtgtagtggtgtggctctctggacttaacgtcactctcagaggtcagaaccttggagatcagaactgattctcaccaggtgtgagaggtgtggtagcagattgcaatgctctgcacctcttccttgcaagtgagcaacttcaggctctctgggcagaggctggcccactgtagtttgcagacatgctctccagatggttttactaagtcccctctccctgatagggaatcctgctggaccagcgcagccctggtgtggagaggttaaaagacttgcacaggatcaccaagtcatgctgtagagccaggattcctagacccagggctctgcactctcaaggctggccccatgtgctcaaggggatctaatgtttgggctccaaactaaccatctcggagctgggctcctcatttactgccaaaccctcagcttatgtagctagaaagggccctggagtgagaaagcctggattttcaaattgatgctcccctactgactagctgtgccactctgggcaaatgctcttccttgagcctgtttccacacctgtaaagtggggatgatgatcctatctcactgcttttgtgaggattacaggaaagcacctgtcctggctctgtacctggcacgtagtaggtgctcagttcatgctggtttccttcctgcctttagtagggacctgctctgtgctcacacctcggctgcatgcaccctgctgtgacggaggctagtgtggaagaggtcctgtcctcagggaattaactgtcttattgggagacaacaactgtcctccttggaacacccaagaaaccatgcaaagcagtggacaacacagaacacgccctcctcctcgctgcctgcagctccaatctgattctgcttgggaatgggcggagcacgtgggctgcttaactgctgtataggacaagccccttacccctctctgggcccatgaattcctggcttggtttatgttctgatttgacacactgattttaatcttcgaatcatgacactgagtgcagaggaggtggcattccgacagcaggacatacatgttggtgtgaagactgggacgacactgggtagaatctagtttttaattattattaatataaaggatcaaattaatttaaatatgattctgaagtctacagaacttttagttctgtgctgtctatgtggacactttggtaaaatgcaaattatgatatggacgttatcattggtctggtgagatgtttcatatttgtgacagttaatttaaaaattatgagttaatgctgcctgtgtctatggggttctgtcttctttgatagccatctattcatctggatcatgggaccctctctaatccttccaccaatcaaataagctattgctattggtttggagttgagatatcagtctcggaaacttctgaaaaatgctaataattacccaaggattatgtcaaattttaaaataaatgtgtgtgtgtttctttaaaaaaaaaaaaaaaa

SEQ ID NO: 149 - DNA, 1793 bp, Homo sapiens
ggcgccgggactccctcctggccgcccacagcctgtgcgcattcctgcattcctgccgccgcccgggacccgagcccccggaggtgtccaggcgcggtgccaggcgggtactgtgcaggttcattctgccacccatctgcattaagacacaaggtgctgaccgcagagacctgccatgaaaccacacttgaagcaatggagacaacgaatgcttttcggaatattcgcttgggggctcctctttttgctgattttcatctacttcaccgacagcaaccccgctgagcctgtacccagctccctctccttcctggagaccaggaggctcctgccggtgcaggggaagcagcgggccatcatgggcgccgcacatgagccctccccgcctgggggcctggacgcacgccaggcgctgccccgcgcccacccagccggttcctttcatgcggggcctggagacctgcagaaatgggcccagtcccaagatgggtttgaacataaagagtttttttcatcccaggtggggagaaaatctcaaagtgctttctacccggaggatgacgactacttttttgctgctggtcagccagggtggcacagccacactcaggggacattgggattcccttcccccggggagccaggcccacgggagggggcttttccggctgcacaggtccagaggaggcgggtgaagaagaggcaccggaggcagagaaggagccacgtgttggaggagggcgacgacggcgacaggctgtactcctccatgtccagggccttcctgtaccggctctggaaggggaacgtctcttccaaaatgctgaacccgcgcctgcagaaggcgatgaaggattacctgaccgccaacaagcacggggtgcgcttccgcgggaagcgggaggccgggctgagcagggcacagctgctgtgccagctgcggagccgcgcgcgcgtgcggacgctggacggcaccgaggcgcccttttctgcgctgggctggcggcgcctggtgcccgccgtgcccctgagccagctgcacccccgcggcctgcgcagctgcgctgtcgtcatgtctgcaggcgcaatcctcaactcttccttgggcgaggaaatagattctcatgatgcggttttgagatttaactctgctcctacacgtggttatgagaaagatgttgggaataaaaccaccatacgcatcattaattcgcagattctgaccaaccccagccatcacttcattgacagttcactgtataaagacgtcattttggtggcctgggaccctgccccatattccgcaaatcttaacctgtggtacaaaaaaccggattacaacctgttcactccatatattcagcatcgtcagagaaacccaaatcagccattttacattcttcatcctaaatttatatggcagctctgggatattatccaggagaacactaaagagaagattcaaccaaacccaccatcttctggtttcattggaatcctcatcatgatgtccatgtgcagagaggtgcacgtgtatgaatatatcccatccgtgcggcagacggagctgtgccactaccacgagctgtactacgacgcagcctgcaccctcggggcgtaccacccactactctatgagaagctcctggtgcagcgcctgaacatgggcacgcagggggatttgcatcgcaagggcaaggtggttcttcctggcttccaggcggtgcactgccctgcaccaagtccagtcattccacactcttaaaaagggtttcttgggaatcaatgtgcaa

SEQ ID NO: 150 - DNA, 2550 bp, Homo sapiens
ggttcctcccttcccaggcagagactgataaactcagcacttgccggagtggctcattgttaagacaaagggtgtgcacttcctggccaggaaacctgagcggtgagactcccagctgcctacatcaaggccccaggacatgcagaaccttcctctagaacccgacccaccaccatgaggtcctgcctgtggagatgcaggcacctgagccaaggcgtccagtggtccttgcttctggctgtcctggtcttctttctcttcgccttgccctcttttattaaggagcctcaaacaaagccttccaggcatcaacgcacagagaacattaaagaaaggtctctacagtccctggcaaagcctaagtcccaggcacccacaagggcaaggaggacaaccatctatgcagagccagtgccagagaacaatgccctcaacacacaaacccagcccaaggcccacaccaccggagacagaggaaaggaggccaaccaggcaccgccggaggagcaggacaaggtgccccacacagcacagagggcagcatggaagagcccagaaaaagagaaaaccatggtgaacacactgtcacccagagggcaagatgcagggatggcctctggcaggacagaggcacaatcatggaagagccaggacacaaagacgacccaaggaaatgggggccagaccaggaagctgacggcctccaggacggtgtcagagaagcaccagggcaaagcggcaaccacagccaagacgctcattcccaaaagtcagcacagaatgctggctcccacaggagcagtgtcaacaaggacgagacagaaaggagtgaccacagcagtcatcccacctaaggagaagaaacctcaggccaccccaccccctgcccctttccagagccccacgacgcagagaaaccaaagactgaaggccgccaacttcaaatctgagcctcggtgggattttgaggaaaaatacagcttcgaaataggaggccttcagacgacttgccctgactctgtgaagatcaaagcctccaagtcgctgtggctccagaaactctttctgcccaacctcactctcttcctggactccagacacttcaaccagagtgagtgggaccgcctggaacactttgcaccaccctttggcttcatggagctcaactactccttggtgcagaaggtcgtgacacgcttccctccagtgccccagcagcagctgctcctggccagcctccccgctgggagcctccggtgcatcacctgtgccgtggtgggcaacgggggcatcctgaacaactcccacatgggccaggagatagacagtcacgactacgtgttccgattgagcggagctctcattaaaggctacgaacaggatgtggggactcggacatccttctacggctttaccgccttctccctgacccagtcactccttatattgggcaatcggggtttcaagaacgtgcctcttgggaaggacgtccgctacttgcacttcctggaaggcacccgggactatgagtggctggaagcactgcttatgaatcagacggtgatgtcaaaaaaccttttctggttcaggcacagaccccaggaagcttttcgggaagccctgcacatggacaggtacctgttgctgcacccagactttctccgatacatgaagaacaggtttctgaggtctaagaccctggatggtgcccactggaggatataccgccccaccactggggccctcctgctgctcactgcccttcagctctgtgaccaggtgagtgcttatggcttcatcactgagggccatgagcgcttttctgatcactactatgatacatcatggaagcggctgatcttttacataaaccatgacttcaagctggagagagaagtctggaagcggctacacgatgaagggataatccggctgtaccagcgtcctggtcccggaactgccaaagccaagaactgaccggggccagggctgccatggtctccttgcctgctccaaggcacaggatacagtgggaatcttgagactctttggccatttcccatggctcagactaagctccaagcccttcaggagttccaagggaacacttgaaccatggacaagactctctcaagatggcaaatggctaattgaggttctgaagttcttcagtacattgctgtaggtcctgaggccagggatttttaattaaatggggtgatgggtggccaataccacaattcctgctgaaaaacactcttccagtccaaaagcttcttgatacagaaaaaagagcctggatttacagaaacatatagatctggtttgaattccagatcgagtttacagttgtgaaatcttgaaggtattacttaacttcactacagattgtctagaagacctttctaggagttatctgattctagaagggtctatacttgtccttgtctttaagctatttgacaactctacgtgttgtagaaaactgataataatacaaatgattgttgtccatggaaaggcaaataaattttctacagtgaaaaaaaa

SEQ ID NO: 151 - DNA, 1908 bp, Homo sapiens
gggacgtcagcggacggggcgctcgcgggccggggctgtatggggctcccgcgcgggtcgttcttctgggtgctgctcctgctcacggctgcctgctcggggctcctctttgccctgtacttctcggcggtgcagcggtacccggggccagcggccggagccagggacaccacatcatttgaagcattctttcaatccaaggcatcgaattcttggacaggaaagggccaggcctgccgacacctgcttcacctggccattcagcggcacccccacttccgtggcctgttcaatctctccattccagtgctgctgtggggggacctcttcaccccagcgctctgggaccgcctgagccaacacaaagccccgtatggctggcgggggctctctcaccaagtcatcgcctccaccctgagccttctgaacggctcagagagtgccaagctgtttgccccgcccagggacacccctccaaagtgtatccggtgtgccgtggtgggcaacggaggcattctgaatgggtcccgccagggtcccaacatcgatgcccatgactatgtattcagactcaatggagctgtgatcaaaggcttcgagcgcgatgtgggcaccaagacttccttctatggtttcactgtgaacacgatgaagaactccctcgtctcctactggaatctgggcttcacctccgtgccacaaggacaggacctgcagtatatcttcatcccctcagacatccgcgactatgtgatgctgagatcggccattctgggcgtgcctgtccctgagggcctagataaaggggacaggccgcacgcctattttggaccagaagcctctgccagtaaattcaagctgctacatccggacttcatcagctacctgacagaaaggttcttgaaatcaaagttgattaacacacattttggagacctatatatgcctagtaccggggctctcatgctgctgacagctttgcatacctgtgaccaggtcagtgcctatggattcatcacaagcaactactggaaattttccgaccactatttcgaacgaaaaatgaagccattgatattttatgcaaaccacgatctgtccctggaagctgccctgtggagggacctgcacaaggccggcatccttcagctgtaccagcgctgaccccaatgcactgagcgctttgcttcttcaagagttgcggccctgatcctctcaagtggccaaaagcttttttaacttttcaatcttcaccttcccttgccaacagagggcactggggtgaattcaagattttcatcgaggtctgttcaatataggacaccccagcttgtccttggctcatccaagaactcttctgtatctaaaacaatacatctcaatcttggccaagggaaaatggactgctttgctggattggcactgagcaactttaggaaatgtcggtggagtgttcagcaagatcagacagcagtccaggtcaaaggcaaacacacacgctccagcccaaatcctcctggtggcacatcctaccccagatgctaaagtgattcaaggactccaggacacctcttaagagcctttctaagaacatgataggcttacttctgctccataataaagtgggagaaaaaagccagaatataacttaagactagataactgcgtacatgatggaccattttttttttttttggctgggtagagaaatcatataaaacgcaggctgtttagcatggagatgactctcagaacactgggagggtctggcacttgatgggggttagttgcttggcagcctgcctgccactgagggaagtcccattagagatgtatcaccaccttgtcaccaacaggatgatgtcaccaacaggatgatgtcaccaggtaataaaccttcatcctcac

SEQ ID NO: 152 - DNA, 3207 bp, Homo sapiens
gcagcttacaccgcggtccccttatttggatctgcgggaatgtgggctggagaggtcctgccgtggtaccagcctccagcctgcccccaggactgcccctgacccaggcgcgcccgctgctcggtggcaggagggccggcggagcgccatggcctgcatcctgaagagaaagtctgtgattgctgtgagcttcatagcagcgttccttttcctgctggttgtgcgtcttgtaaatgaagtgaatttcccattgctactaaactgctttggacaacctggtacaaagtggataccattctcctacacatacaggcggccccttcgaactcactatggatacataaatgtgaagacacaagagcctttgcaactggactgtgacctttgtgccatagtgtcaaactcaggtcagatggttggccagaaggtgggaaatgagatagatcgatcctcctgcatttggagaatgaacaatgcccccaccaaaggttatgaagaagatgtcggccgcatgaccatgattcgagttgtgtcccataccagcgttcctcttttgctaaaaaaccctgattattttttcaaggaagcgaatactactatttatgttatttggggacctttccgcaatatgaggaaagatggcaatggcatcatttacaacatgttgaaaaagacagttggtatctatccgaatgcccaaatatacgtgaccacagagaagcgcatgagttactgtgatggagtttttaagaaggaaactgggaaggacagagtccagtctggctcatatctcagcacagggtggtttaccttccttctggccatggacgcctgttatggcattcacgtctacgggatgataaatgacacctactgcaagacagaagggtatagaaaagtcccctaccattattatgaacaaggaagagatgagtgtgatgaatattttcttcatgaacatgccccatatgggggtcataggtttatcactgaaaagaaagtgtttgctaaatgggccaagaagcacaggataatatttacacatccaaactggacattgtcttgataatggttttcctgatcttgccgcatcacttaatgtgatccccatactgcaactgtgatgctgatgatgctaatggagatgatggtaatgataaagacaacaacaatgattatcaagttcctgtacactctcagatgtggatggtgactctgctagtaatttaaacttggcatttcatggaggatggttgtgctcatgatgttctttctggaggttcaacactacgtaccgcactttataatttaactggaattgagatgaaggccagtgacatgacaactgtgacctaagaaatgggaagattatctttcaagatagctgcctagaattgttcaacagtgagtaacttccagaagccaaaagagtttggcttcatgaggcaaggtgattgactcaatggcttgttgaatctcagcagttccgccatcttgaagaatgattgattgtcaaacactgacccaagaactgctatcagggtgcaagtatcttactacttagcctaaggatgggaaaatatctcttcctaatataccatctttctacagtatttcctacagctaaagcctcaggccattgcctaattaacaatgaagatttcatggacatcctacacttcaggattacttgactatctcaaacacataaatcaaaatgggccaagtagcaaatcttgatgaatttccactcttaccatccattcttactaccaacagtataactgaacatgtgattagaatgatctatattaatgtttagttatttttggttgagtgctaaatatttcagaaggctacttaacatgtaagataccaacttcaacactgtaataacatatactgtgaaaacattcctaaaaagtaaccaaagggtttgctaactctgcttcaacatccaacaacacaaaactatatgatttttaaaatcatgaaatagagacagcaaagcatatttttacatcaatttgtatcctatcatacttcataatatatatttgtatattcaaatttctattttataggcccaaggtgtgtttctccaaacattacattctcattgccaagtgccagctgttacacatggagaggaaatgattccttatattaaacctgaccagagctttttgccttctagggatttatttttcccatagtgtatcagttgttatgccacaataacaacaataataatgttcttaatgtccaaagtgctttgtcatttagagtcctttaacatctgttataccatgtgatgcccttgaacaccccattgggctattgtctgtgtattctgccctctttagcagatgatctgtaatttggtcattgttctgttatattccagattgctctacttgctaatatttgtatagaatagaatttatgtaaactagtaaccagttgatctctgtgccaaatacattatatcaggattacacaaaaagcatcacaaaggatggtcttggccatatgctagggcccctgtgaaaataagtagttttgagaagtttttctatatacgtatatatacacgtgtggttctatttaggtggggaaaaaatgaaaaagcagggacaacaggaggaaatgaaggcagagaaatatagtttcctttcctaggattgagacaattctatttttcatatactcgttgctcattaaatagtaaagggttgatttgctgcaagagtagctgagaattcaaaaacatccttgcagaatgattcaaaagacaaaagccaggctcaacttatagaatgttttggaaactggaagtaatgatacatttcacttcagaagcacttgtaggtctttactagtgctaagtattatggtgagctatcattaaagtgtgccatcttggataaaggccttttgcctactctcttctgcaattttgacacctcaatattcacacccataaacattactaagccccagttctatcgttggaaggagttgttattcttttgttgttcccttatgcaatttttaattctatgaatgttaagtttttttgagctaatgatagatagaaatgcccactcaaagaaaaataaacagagacaaatgttaaaattgccatacagactgtttttccccctgttgtttcactttaaaataaaaagaaatccttgattaatc

SEQ ID NO: 153 - DNA, 2048 bp, Homo sapiens
ctctgcaacagccgcgcttcccgggtcccgcggctcccgcgcgcgatctgccgcggccggctgctgggcaaaaatcagagccgcctccgccccattacccatcatggaaaccctccaggaaaaagtggccccggacgcgcgagcctgaggattctgcacaaaagaggtgcccaaaatgaagaccctgatgcgccatggtctggcagtgtgtttagcgctcaccaccatgtgcaccagcttgttgctagtgtacagcagcctcggcggccagaaggagcggcccccgcagcagcagcagcagcagcagcaacagcagcagcaggcgtcggccaccggcagctcgcagccggcggcggagagcagcacccagcagcgccccggggtccccgcgggaccgcggccactggacggatacctcggagtggcggaccacaagcccctgaaaatgcactgcagggactgtgccctggtgaccagctcagggcatctgctgcacagtcggcaaggctcccagattgaccagacagagtgtgtcatccgcatgaatgacgcccccacacgcggctatgggcgtgacgtgggcaatcgcaccagcctgagggtcatcgcgcattccagcatccagaggatcctccgcaaccgccatgacctgctcaacgtgagccagggcaccgtgttcatcttctggggccccagcagctacatgcggcgggacggcaagggccaggtctacaacaacctgcatctcctgagccaggtgctgccccggctgaaggccttcatgattactcgccacaagatgctgcagtttgatgagctcttcaagcaggagactggcaaagacaggaagatatccaacacttggctcagcactggctggtttacaatgacaattgcactggagctctgtgacaggatcaatgtttatggcatggtgcccccagacttctgcagggatcccaatcacccttcagtaccttatcattattatgaaccttttggacctgatgaatgtacaatgtacctctcccatgagcgaggacgcaagggcagtcatcaccgctttatcacagagaaacgagtctttaagaactgggcacggacattcaatattcacttttttcaaccagactggaaaccagaatcacttgctataaatcatcctgagaataaacctgtgttctaaggaatgagcatgccagactgtaatcccaggtattcactgcatcagacaccgagacactgaacttcctgagccaccagacaggaaagggtagcagaaaacagcttcactcctcaggaagtaccatggacagacgcctaccaggggtgacaaagcagtgcagttggattgtaaggaaaaattccggaattaatgcatcctaatgaatgttgtccccttcaatggtgttaccttaggagctgaacattcaattcagttacaccactatgactaaaaacagtttggatctcttagtattgcctttgaaactgcaacataagcaactcaacaatattagttgcattcctttatagacataccatgtcaaagacgtttttctatcaagttgtattctttcctgttctataacctttgtcatctgttagactctgtatgtgtgatttgtaaaaagcaggctgaaactatggacatgatttctgaagagcacatctccactgactttcataaagcaaatgtccaatatttatttattgagagttttttagtgcaatctgggccagtatttttatagattatgattatgtggtaatttatccttcctaactctttaatcctgaatgatggttggaaatggcctagaattaggttactctgttcacaatgctcattgttagcatgcaattggtatttgacttggaagtgttgtgttgtattttttgaacccctaggcttcaggaaaactgctcttttgtaaaaagaatagcgatgacattttctaatgtgcagaaatgttccaaaaggacaaaattgaaaaccaaaaactatgttattaaaacaaaaaaatgctaaaaaaaaaaaaaaaaaa

SEQ ID NO: 154 - DNA, 2416 bp, Homo sapiens
ggcctgaggagcgcggaccccggcgctcggctcccggcgccatgtgagggggctcgggggccgcggggggccgggcgctccccgccggagatgaggaaactgaggctcagagaggtcacatggcttgctcgaggccccccagccagtgtgaacccacatccctgcccccagggccacctgcaggacgccgacacctacccctcagcagacgccggagagaaatgagtagcaacaaagagcagcggtcagcagtgttcgtgatcctctttgccctcatcaccatcctcatcctctacagctccaacagtgccaatgaggtcttccattacggctccctgcggggccgtagccgccgacctgtcaacctcaagaagtggagcatcactgacggctatgtccccattctcggcaacaagacactgccctctcggtgccaccagtgtgtgattgtcagcagctccagccacctgctgggcaccaagctgggccctgagatcgagcgggctgagtgtacaatccgcatgaatgatgcacccaccactggctactcagctgatgtgggcaacaagaccacctaccgcgtcgtggcccattccagtgtgttccgcgtgctgaggaggccccaggagtttgtcaaccggacccctgaaaccgtgttcatcttctgggggcccccgagcaagatgcagaagccccagggcagcctcgtgcgtgtgatccagcgagcgggcctggtgttccccaacatggaagcatatgccgtctctcccggccgcatgcggcaatttgacgacctcttccggggtgagacgggcaaggacagggagaagtctcattcgtggttgagcacaggctggtttaccatggtgatcgcggtggagttgtgtgaccacgtgcatgtctatggcatggtcccccccaactactgcagccagcggccccgcctccagcgcatgccctaccactactacgagcccaaggggccggacgaatgtgtcacctacatccagaatgagcacagtcgcaagggcaaccaccaccgcttcatcaccgagaaaagggtcttctcatcgtgggcccagctgtatggcatcaccttctcccacccctcctggacctaggccacccagcctgtgggacctcaggagggtcagaggagaagcagcctccgcccagccgctaggccagggaccatcttctggccaatcaaggcttgctggagtgtctcccagccaatcagggccttgaggaggatgtatcctccagccaatcagggcctggggaatctgttggcgaatcagggatttgggagtctatgtggttaatcaggggtgtctttcttgtgcagtcagggtctgcgcacagtcaatcagggtagagggggtatttctgagtcaatctgaggctaaggacatgtcctttcccatgaggccttggttcagagccccaggaatggaccccccaatcactccccactctgctgggataatggggtcctgtcccaaggagctgggaacttggtgttgccccctcaatttccagcaccagaaagagagattgtgtgggggtagaagctgtctggaggcccggccagagaatttgtggggttgtggaggttgtgggggcggtggggaggtcccagaggtgggaggctggcatccaggtcttggctctgccctgagaccttggacaaacccttccccctctctgggcacccttctgcccacaccagtttccagtgcggagtctgagaccctttccacctcccctacaagtgccctcgggtctgtcctccccgtctggaccctcccagccactatcccttgctggaaggctcagctctttggggggtctggggtgacctccccacctcctggaaaactttagggtatttttgcgcaaactccttcagggttgggggactctgaaggaaacgggacaaaaccttaagctgttttcttagcccctcagccagctgccattagcttggctcttaaagggccaggcctccttttctgccctctagcagggaggttttccaactgttggaggcgcctttggggctgcccctttgtctggagtcactgggggcttccgagggtctccctcgaccctctgtcgtcctgggatggctgtcgggagctgtatcacctgggttctgtcccctggctctgtatcaggcactttattaaagctgggcctcagtggggtgtgtttgtctcctgctcttctggagcctggaaggaaagggcttcaggaggaggctgtgaggctggagggaccagatggaggaggccagcagctagccattgcacactggggtgatgggtgggggcggtgactgccccagacttggttttgtaatgatttgtacaggaataaacacacctacgctccgaaaaaaaaaaaaaaaaaa

SEQ ID NO: 155 - DNA, 2117 bp, Homo sapiens
ggggggggttgcctggcggcgcagcagcgcgggaggcggcgaagggcgcaggagcatcgctcggaggggacaaggggacgccacgggccacatgtttaggagggagccgagccttctcccggaccctcgccgagggcgaccgtgatgctgcagaaccggcgggagcgactcgccgccgccgctctctgcgcactcggagaccccagcgcccgccttctgcaggggaagcgaccatggccatagatcgtgacttcacccccagccacttcccctagaaagaaatccttggaaaagttgcatttgaaaaaatccttgcgctgacctttggggccgacggggccgaagaagcgtgcgtgcgtttgcaagtaagagaaccaaaggtgtgtgtgcatggggggctggcggtgggggaccctccgctgccacttcgcctagctttgtgctgaggccccggcccccgcccctgggacgccggggctgcgatgagcccctgcgggcgggcccggcgacaaacgtccagaggggccatggctgtactggcgtggaagttcccgcggacccggctgcccatgggagccagtgccctctgtgtcgtggtcctctgttggctctacatcttccccgtctaccggctgcccaacgagaaagagatcgtgcagggggtgctgcaacagggcacggcgtggaggaggaaccagaccgcggccagagcgttcaggaaacaaatggaagactgctgcgaccctgcccatctctttgctatgactaaaatgaattcccctatggggaagagcatgtggtatgacggggagtttttatactcattcaccattgacaattcaacttactctctcttcccacaggcaaccccattccagctgccattgaagaaatgcgcggtggtgggaaatggtgggattctgaagaagagtggctgtggccgtcaaatagatgaagcaaattttgtcatgcgatgcaatctccctcctttgtcaagtgaatacactaaggatgttggatccaaaagtcagttagtgacagctaatcccagcataattcggcaaaggtttcagaaccttctgtggtccagaaagacatttgtggacaacatgaaaatttataaccacagttacatctacatgcctgccttttctatgaagacaggaacagagccatctttgagggtttattatacactgtcagatgttggtgccaatcaaacagtgctgtttgccaaccccaactttctgcgtagcattggaaagttctggaaaagtagaggaatccatgccaagcgcctgtccacaggactttttctggtgagcgcagctctgggtctctgtgaagaggtggccatctatggcttctggcccttctctgtgaatatgcatgagcagcccatcagccaccactactatgacaacgtcttacccttttctggcttccatgccatgcccgaggaatttctccaactctggtatcttcataaaatcggtgcactgagaatgcagctggacccatgtgaagatacctcactccagcccacttcctaggaacaatggaagaagaaaggactgaaccagggtatttttgttaggttttctatgtgactccaagagggaatggtcaagttgtttcatgagtttgcatgggcccttggaaaaacaggaaaggagcaatgaagatccaagcaaaactttactttcagcgttggcttggaggacaaataagaaatgaaacatcctatgaaatactttatagcacatggcagatttgcaactagtaaaatgctggtgaaatgctgttggtaaagcacatggttcaaatctagaagatgcagttcaaaaacaagacagactcgagttgttagggctgaggaaccaatcaaggtagaacaaagaaaatgttggggtaaaagtgttgctgattgtcaacacaaactggcttaataatattaataagaacctgtcttattaagactggctttagaaccgtaggtttttttaaaaaattattatttatttttgccctctttggggaagtgggtgggtagatttaaaaaatcccttcctgagtaataaagatacaaaatgttactgctgataaaaaaaaaaaaa

SEQ ID NO: 156 - DNA, 5626 bp, Homo sapiens
cgctgccgctgccgccgccggcccggactcgtccggagcgcagggtgtctgcccagctgcgcgcggcgcgcggaggctccggcgtccgccgctgcgccctccggcccctgctcctcgcgccggcccgcgtgggtcccggcgggcgcgaacccaccatgcagctgcagttccggagctggatgctggccgcgctcacgctgctcgtggtcttcctcatcttcgcagacatctcagagatcgaagaagaaatcgggaattcgggaggcagaggtacaatcagatcagctgtgaacagcttacatagcaaatctaatagagctgaagttgtaataaacggctcctcatcaccagctgttgttgacagaagtaatgaaagcatcaagcacaacatccagccagcctcgtccaaatggagacataaccagacgctctctctgaggatcaggaagcagattttaaagttcttggatgctgaaaaggacatttctgtcctaaagggaaccctgaagcctggagatattattcattacatcttcgatcgagacagcaccatgaatgtgtcccagaacctctacgagctcctccccaggacttcgccactgaagaataagcactttgggacttgtgccatcgtgggcaactcgggggtcttgctgaacagcggctgtgggcaggagattgacgcccacagcttcgtcatcaggtgcaacctggccccagtacaggagtatgcccgggatgtggggctcaagacagacctggtaaccatgaacccctcggtcatccagcgggcctttgaggacttggtcaatgccacgtggcgggagaagctgctgcaacggctgcacagcctcaatggcagcatcctgtggatccctgccttcatggcccggggcggcaaggagcgtgttgagtgggtcaacgagcttatcctgaagcaccacgtcaacgtgcgcactgcatacccctcgctgcgcctgctgcacgccgttcgcggatactggctgaccaacaaagtccacatcaaaagacccaccaccggcctcttgatgtataccctggccacacgtttctgcaaacaaatctacctctacggcttctggccctttccgctggatcagaaccagaacccagtcaagtaccactattatgacagcctcaagtatggctacacctcccaggccagcccgcataccatgcccttggagtttaaggccctcaagagcctacatgagcagggggctttgaaactgactgtcggccagtgcgatggggccacgtagggtgggcaccccatgggactcagtggctcacatttcctgccagctacaccacaggcagatgggagtcggggtggcacaaacaatagaacaagcaggctagtggttttctttgttaaagtgtaaaacagtgaccagaatatatatatctatacctgcatatatatattgacctgagtatttataactgtgtggtgttcatctagcattaggcagataggccacaggaagaaggtgtggagaacccacctgaaccagattgagactcaatccatctttgggggtggaaggacttgacatgaaaagaagccagtcccatgactttggatgacaaactgcctcctggcttggagggatctttgggctcatggatgaatggcgagccacctgttgtcagctgccccaagcctctgggatatgtggattcggagaaagctgaggcccagaggggacactcgacccagtctaaagtgggtgccattcacggaggagagggaggttggagacttcaaccgggcaaaggagcacaaggaaaccaagcagcagaggccccatcagcacagagggcctcgttccacgaacgtagagtttgactgcctaagggacagcacgaatgactcacatgtttcagacaggcctccacggctatggagagaaggctggaggagacacaatggatggttcatgttctggcttagcaagagccaccaagaactttgggtgaagcaagcagatgacaatgaagaggagtaatgttccgaatcatgtttttgaaaaatcaagacctcctgttaagggcccacttgaccctagaataaggcaggagagtgtctaaaatctagctgctttgggtgttttttaaagcaatgtgagtccactgaggaggaagagaccctgggatttcaccctctgggttagtctctgtctcaccctgttagaatgtcacgagggactgtactgtcccctctgtcaccagggaagccacaatgagagcttgaaagggtgctgtcaagataaatgtcatccttcttaaaatacatatgattgcctttttgggtgcctcacagagccccagagtgtgagacctgaaagaatgttcagcatctagctccatgtccctgcaaccactctctgtttgccttctgcattctgcactctgcggggcctttgcagccagactgctgtgtcaatgttactttcttgtcactttcctaccctgatggtcacactagcccaccccaagctccgacattgaggttttcatctctgcagggagaggttccaatgtccaccccacccccaggtacccgcctcttcccacagaagcaattttagaattttgcaaaattcttttccccttattgagattaatatttaagattaaaaaaaaaatacccaaagccaaatgcagttccaaatagtggacataatctcccagggaaatctgggctcgaggcctacaacttaggggctggaatcacaggtctcacatagagaaatagccagcttgaatttgttagtcgtattccttcacctgatgaataacagtgttttaaaacatatttgaaaggtaagtaaaaaactaccatcttgaaggtgaagggagttaagaaaagtaatcaagacctgctcctaagcatatgagaccagatgtaattaatcaatggcaatgcagaacaggaccttggctctaaattaatggttgaccggaagggattggaggcggcagaaccattaaccctacacaagaacactccagcccaaaaccgtgaggaaggtgatatatctctgcattttcccttgttgttgcttgaagtctgtgattggggatttgcgttataaaatgaatattttaaaaagcaacagccctaatagcctctgtgggaactgagtggtttcggactcctcacaggcggtggaaataattaataccatattttatacatctccagagcctttcatcttgaggatctcaaagaccgtagaagacatttaatttctaaagcttgaagtgccccgaggagcaggtagaatttccagcagggccttggtggattaaccaaggccttggattccagaatgtttcatggtaagcactgtggagaacctacatgtcaggttctggagttggccctgagctctatccaccaagccagcaccccaccatccctttgcaggggagtcaaagggccagaactccttgggggaccagaacatggttttccttctgcctatcttagtcatggctcctaaaattgaagctgatatgagctggagtgcaaggagtccttccaccctgccttcaggttctctctggagaaaggttagagaccccaggacaatcaacatgtgcaccgttcccctcctcggcttgagtcctgcactaccaaaatggcctggccatttgatggcggagctccaggggccttggctttctctggctcattgtccttctccatctgggccaattgtccttccctgcccattcagagttcaatttgagcctccactgcagttcctggtgtgggccagctggtgttgggtggccccagggagtcacacagtctgtacccggccccgagatcctctgctgtaactgcagggtcacaggcatcccgggagaatgggcctccaccctcagccagccctcactgctgacaggcacccctctgtcacctcctgccacctgtcagatacccagcctgcccgccatcagccacccgagtggttccgacctccattcacctcaagccccaacaggcccctgtcattccacttcatggaagagacggagccttctgaaatgagatctaccctgaaaatctcttctccttcccctttctgagaaacgtcatccccaccagttaacgtttcctgtacaccctcaccctctctcgtccatctctgttgcctctgcacatcagcacacactgactccacctgggctggctcctgccgcctcttccctacctcctccactagccgcaggaagggcctccagcacccacaactgcccttcctcttgatgcccctcggcttccccccagcctggcagcagcgtcccagcgcctccacattgcccctctcacctcccagctctccacgccacttggctctgcagcgacccctcctagacgctccctggcccctcggcacccagaatgccacattcttgtgtttttttcctccttctttcccaatccctctcaaccatgtatttatttatatatgtatgtatttttttatttattatttatttattgaaacccctactttgattgacaaaggaatcaaggtagatctgaccagtattcccctctcttctccttgtcccaccacatggacatgccttacactggcgtcctctcctgagtccctccgcactctccatcagcaacctcacacctgccttcagacccggctgcaacttcctaagctgcccctgccccagctcctctctgcaacccagccctctcctgagctctaggctgggattacacccgctggagggacactcaccccatctgctcccacggcagcaccatcaactcaacaagtcagaagccaagtggatcatctgtgtccccttcccccacaatccctcctttttctagtaaaagacccgtgatcccgtcagccacccagtctgagatgctgacgttatcttcgactattcttccctgtcctgccttgctaattcttcccactagcactaatctcgactctttgtcacttggactatttcagcaacagtctcatctcccagattacctctgtgcacactgacacgtggtcccgtccatcctgaacatgcacagtgattttcctctcccgttgcacacaaacctttaaaagttccccggcccgtgaacaaatgtacaattctctattctgacattacagaccaccggataaggccccattcttcctttacaccctcccctggtcagcctaggagagttgtttttcctggaaagggtgcctgcgttttactgtctctgtgcctttggtcttgctatccccatcccctggaatgctcccttttcttcccttcaaagcccatgcggaaaccacgtccttcatgaagccctccctgatgtaccaaccactgggatctctccctctgctgaaccaccgtagcactttatttgtacctttctcatggcacttaccatattctgccttgtattatagttatttgtgcacttgtcctttgactgttcttagactgtaagcttgccaagggcagggactgtgttttattcatctgtatccatcacagcactaggcgtggtgcatagcacacagcagttgctcaataaatgtttgttggattaaatccttaa

SEQ ID NO: 157 - DNA, 10154 bp, Homo sapiens
ggcagcctcgctggaaacgcgcgggggagcctgagccggcggccggggacgcacggcgctgcgcgctccttcgccacgccgccgcgcagcccctccatcttcctgctcggcaccgggccccgcgcgcccctgcctacggggtcccgctgctctccggggctcctgccagccccaacccccggccccggtggcctccccccacccccgcccgggtccccctcctccgccacacgcgcgcgcgctcacacacacacacacacacacacacacacacacacacatatatacacgccagcgagctgctggccgctcaatggaccgatttccccggtttccctgaacccagcccagcccgggatgagaaactgcaaaatggcccgggtcgccagtgtgctggggctggtcatgctcagcgtcgccctgctgattttatcgctcatcagctacgtgtccctgaaaaaggagaacatcttcaccactcccaagtacgccagcccgggggcgccccgaatgtacatgttccacgcgggattccggtcacaatttgcgctgaagtttctagacccgtcattcgtgcccattacgaattctctcacccaggaactccaagagaaaccttctaagtggaaatttaatcggacagcgtttttacatcaaaggcaagaaattcttcagcatgtcgatgtaataaaaaatttttctttgaccaagaatagtgttcggattggacaactgatgcactatgattattccagccataaatatgttttctctattagcaataacttccggtcacttcttccagatgtgtcacccattatgaacaagcattataatatttgtgctgtggttggaaatagtgggatcctgacagggagccagtgtggacaagaaatagataaatcagattttgttttccgttgcaatttcgcccctacggaggctttccaaagagatgttggaagaaaaaccaatcttaccaccttcaaccccagcatcctggaaaaatattacaacaatctcttgactattcaggaccgtaacaactttttcctcagtttaaaaaagcttgacggggccattctttggatccctgcatttttcttccacacttcagcaactgtgaccaggacattagttgacttttttgttgaacacagaggtcagttaaaagtccaactggcttggccgggaaatataatgcaacatgtcaacaggtactggaaaaacaaacatttgtcacctaaacggctgagcacaggtattcttatgtacacccttgcatcagcaatatgtgaagagatccacttgtatggattttggccgtttggatttgaccccaacacaagggaagatcttccataccattactatgacaaaaaaggaaccaaatttaccaccaagtggcaggagtcccaccagctgcctgctgagtttcagctgctgtaccgaatgcatggggaagggctcaccaagctgactctgtcacactgtgcctaagaactccaaacggaaagcgccaaatggctgtttaaaaagtgccccaaatcaaattgaatagccttcagaatagaaccctagagaatgtcttataaggattgtctgccatttaaaaggaaagatgtcttttctcttttgcactgctcttttaagagttttagcagatttagcaggacagatgcattgaagccacatggtttagacttgattgataaagggaatgttgcatttgggactatgctgctaacgaaatggtttgaagtattttcatgtttggattttaataataaactgcctctcatttttatgaggactagagctatagtttctgcagctctgctcagatagtcctcataatcagaggcctctggccaactggggcaggacctgttttgctggtgggatcagactctgaaaaatggaaacgtaaaaaactggtttgcatatctcatcttctatctatctccctatctccatctctatcaccatctcactccttccctctgcaactactccctgccctaccaccgtggagtttaataatttgctaggaatcctattgaattcgctttgcttgtatatgttgcatttgtacttgatgtgtttaaggttctgggtaactttgatgcttcatgacaaaataggcaaatcacgatggactcccttgtgattccttttttaaagaaatgcctctgatgcagtcctcaccagtccattcagtcattctacagcaagatggtccctctgtggtgagtgggatataaggcagtgcatctttcatgatcacaaagaaagcctatgttgtggatagcattgcgtctcttgatgtaggcattgttatggcaaataatagcactgtggccacatctgtaaggccattccagcctaaatttagtgtctcccataatcccaacccatgcactaggctgggtgttctctcagaatatagaggcaatgaatcagcttaagaccctgggacacacaaaggaaaaggaagaagaatatttagaagttgttatggaatcctgtgtaccctaaagtgtggtaaccatgttacccattccagctgggttaaagtggaggaggatcttggccaggccaggtgcccaggtgactagtgctgaggtgcgatcgttttccgtatcattgtgtgcaccaccaccaatccagaaccatttgctctctttgagaacattgtagcactggatattccctctttccactgaagtcagatctatacaactacaaattaagcatttcaaaagaaaaagccattgtgcagtggcaagagttggaatccaagattatgtagacctgcgatgaaggaagtagctggccattctcattttctttatttcagccatatgagtagaaatcaaatcattcccatccctggctttttactgagcagcactttgttcttccaattcagcccaacgtctggccaagttgatgttaaattttaataagagtttctttcttctttccaaatgccagtcaagcatatttgttatgcatttgagtggggtagctcattcttttcctgaaatctcatctagattgcttgcaatgcgacaaataactgtttaaaaaatgtgctgtagttcagtgatgagctcattgcccctctttaggaaggtaagatcatgcctaaaattaaaccgaatatggtaaggaaagacactatcgttatgctcacgttctgcctggtcctaaacctgccttattattattttcagaaagcaatctaattagagcaacttgcatagatctagatattaactaatgaaagaaacaccaagttcaaatgtgttaccaattatgacacacattacaatataattataaggggagacattaaaaacattttgtaattcagtggtataatttgatgggtatcacaaccacaccgtgtttgttccctgtccctttgaagaggactgtactaccatcctcacactgtgctctgttgggatcactgagagattgacaactgacagaagtgtttagttggctgttcctgagcacttagttcatttggttatagctaagtgatattaatgccaatattacttgggccagattctgactctggagttttaatcccaatgtgcccattcattttcactaaatataaatgcatagacactttaaaccaagaagattaaaagaggaaaagaccagaatctctaaaaaacagtttactgttctgtagtggacaatttaaattttatctcatcataatgccaaggatttttgtttgttttttaagttcagggagattttttaaatctccttgcagtcttggctccatcttaaccttagagtgggaggactttcccatcccccaccaccgtgttatctatcactttaatgaaaactcaaaatagtgaggaaatggacttttcttcagaacttgaggggtttagagatcaggctcatctctgcttataaggaggacttcctggagatgatcccaatagatcacccttcacttttgaagaatagcagcttctagctgaccatgcaaaatctctgtttgtttttaaagactgtttcaaagattaaatctatacaaccacttttatgaccaaaaaagttgttgtgtcccaagtgtcctaattagaaaggcagctggctctcctgcagctcccaggcttgtgtagtcaagtgcagtgaactgggcagtaatcagctcaggaccattggctctttcctcctctttcagctacagacacatgccctggcttttgcattgaccttgctttgttagttctagactaatttatccttttgtcagacactttcccttttttaggatactcacaacagagtccactttcagctattggaatacattttaccataaagcccccaaggctttctacccataacaccaacacaaaaaaccaattaagttgcagaggggggaaataatcacaaacttttggcaacctgcttaatgctagacgctctgttttcactggttattctgagtgtcatatgcagatgcagatccaagggagacagggctaaatggtggtgtcaagaattcctcccacaccccaaaaattctttccaatatttgattattaaaatatctatcatttctccaccttgtgtctgtgtcttaagtgtctgtgaatattgtaaaagtgctgtatgtttagtagtgttgtgtgcctggcagtgctgactatgactactgtgccatctgtctgtgaccttgatgtcaggtacctggccatggggctaccagcaaggatgtgcaaaggaagaaccgctgcccctgccctcagcttccttatgcccgagccactacttatccgtgaatgtgagtgccaagagaaacctaatttggtggggaagccaaggaatgggagaacgttttttctgatttgagtcaaggcactaattattagacactctcagacaacaaagcggtattgacctgagatcaaaggaagcagggacaatattgtagaatgctaggacactggaaatgaagaggccttcagcttcgccagtcttgattcttgactttacaaatgagaaaatggagaaacagggaggctaggtgatttgccccagatgacactgtcaattagtggagaaattatgattcctcctctagtacttcttggtcttaccagcatcaaatgaagctgggctcacagggaaagtggtttttggtctgggatctgcagagcacataaaataagttagaaagtctataaaagaggaaaaaaggttctcctctccctcccaaaaatgacttcccaacacagaacaataaaggagatgcttgtgtgggtatgcaactgtccaccaattatcacctaccttctccctgagatgaaacaaaacacgcttggtaaatcatgatttgataaataacaattaagttactggtggttcatgcttgacagctgcaatcttacccaataagctattcatcttagtaaaaccttgttttagtaatatacatgcataatttagaagttgaaggctgaaaattgttgtgttcttctccatatatatacaactttcatcggggtcccttgagttaagaaatgccttctattttataggtaatctcaacagcagactttgaaatattgtgtttggttcaatatgctaagaagatatacaaataataataacttcgtgagtcttcatgtgcaaaatgacaaactgagcaattttctgtataattctagattcttaaaaccttttttcccataattgtttgaatgcactaggcacaagtttctgtttaagcctctgcttctccctgaatgtgtagaactgtcactttgcttacaaaggggctgtgtgtttgtggctggcagcccagatagagcactctgggtgctggggattgagggcaccttggccagctgattgacctgtctggactctgtggcccaattaatcgaggccacagatcagttggtactaagcatcaaaatgattcattatgcctctctcacactccgattgctttgccacatagataacagcatttgaaatgggaaacactttagaatgtcattattgtattatatattgtcatcttatgcagtatttctgaaaatttatttttattgtgatgactgattgaagacatatgtgtatgaatagatgttcctcagtgaagcctattctcttgttgttgatgacagtggcatcagagtgaagagttgttgcagagtaactgacttcagtttaaggttaccctggggttctggggttaggacccggattatgcagctgatctcccagcaaacacagctgtatgaaataagcaactcttcaaaatacaattcttgccactcattctggacctttgattcataatgtcctgggataagtccaacttacaaagattcccaggtgattcgtgtgaccaccatttggaaaccagtaatatatacatccggagtcatatataccattttgaacaaagtagctaaatgcttatctctccttgtgcgattagtttcacatgttcgttgaggttatcatgttaaatggcaatatagacacagtcttagtgattcaacaattcagctgtttcagccgaattgaccagttgctaatttataagcaaattgtaactgatcaatttagtcagaatggatgcaagcccaaagacaaggtggagagcaagctttaatatacactttgtctcaaggccagctcttcatatttccctctttatatttcaaactaagaggcagatctcaggtcactcatctttagaattggtgagaatgagaaacagggaactgaagtgattcattcagattcaatttggaagtcattcccagagcctaaaatatttatctaaggggtctgatttatcaacctcaggtagtctccaaaacacaaaggtattcaggctaaaataaaaccaatcaaaaaaggaaattcaggaggctccagttctaagactaacccagtataacaagggtgatcagttattacttgtggccttgtaccacctctgttggataatgtgccaccgtcctaatgaagctttggccagacttctttctatagctgtgcacatagaaaggctttagacaacagtgataccaaagggttcctttgattttccttctgtgtgattctcagacagttttagctctttggtgtgctgccaaatgtttaacaactggctctggaaaacagtggaacccagatttttagcacctaccaatttctatggtgtaaatactctcatctcagccaatttcaggctactaacttaatgtcaaccagctgaaaacacaacaatatgttttcaagagccagtataagttggctccaatacagcatgagccagctccagcatagcactgcctgaacaatttttaagtcagtgagtaccaaataggagaggctagcagaggctttggagggacttttaaatgtcccctccaccaagggaagcatttccatgttggttagttttactgatttttagtaaaagagcatattattggatcccaaggtgttcaaatattccacgtgactcttaggaacctctcaacagactccccagtatcttgggagattaccaactgtggcttttctaatttctaagggtgaccctccaggaaaacattctttaatttaactaccagttaaaaccatgtttggctgatcttttttaaaaaatctatacctatagttcatcacttgtttccccaactttgtcattttccctatccacttgcccctcatccttctgacacaataaaaaaaatacaggtacccacaaaacagtgcctgcaaaggagcaggggaagaacaaggcacccagtaagctcacttggctctacatatctggaaaggcactgaggttccaaggtctctaccccaccaggggacacccagtaaacatcacgctgagagtttaagttgcactcaactggagttgatttgcccttagaaaagtttccaacggtgaagaaataccacttggtaggaatatctctgggcaacttcattgctgactgggcaaactttgtaggataaggtgtcatgtgatgtaaggctggaccatgaaaaacaaaaatctactaatacacatttggcccctgcagtcccctggcattgagcaatagagcaactgtcctttctcaccactagttgtgagtgtacttccaactgagtgtttagaaatcaggtaatctggtaatccacagaacaagctttgtttgcaaattgcaaatttttctggtagaagtcattcttaggtgggcttcattaaatctttggagaggcaatgctgggaaaaaatatgcctaattcctaggacacagtgagtggccgtaagttgttatctgcatgtactaaatcaaaattagatcatgaaggaccaaatctacttccgttgctataataaaataccctacaggttctgtaaggcatttctaaactgtaaatgcttgaaacgcaagttggacattttctatactatgtgtaaaatgccaggttatacctctattttctttcttcctaatggtcattgaaatgagcttgtttctctacattgagcaagctacattttattttaaatgagtcaggtgcatgttcagatgtctgtattcccaatacattgcatgcagcctgagcacaagtatgccttcaccctctggctcttttcctgacaccaaacagagaagtccacagctacaagcacaaggggcttgacaggtaggccttgttttattatgaacaaattcaccagaaaaccattcttgaggaaccagccactcccatagcatttttagtcttagggaagaaaattggcagggaagaaaaattggcagacaatgggaaagaggtttggtcaacctgcataagtggaataaagtcattgaagtacttgcaaaaagaagagggaggtttccctctgaaggaatctagaccattttttaatatggagaataactgtaccccatgttagaagtgctctttagccatatttcaagatccagatctgaacccatactgtgcagaaaagcacaagagcgcttacagccaagagccctgggaggagttgagtaacaggctgagatccggtcaccaagcatcattagttagcactgaaattctcccaggacacaaaacaaatgtatggaaacatcgcaatacactatcatttactcacatgggacaaccacctaagtccatagcaaaactttacagatctagatgttatctcaagtcaggattccagatcaacatcctccatgtggagatgagacaactgaggttcagaaagttggagtgacttatttgcccagctagctaactggaattagagtctgggtctcccaaccactgattctgctacaccacactgtgctgcttccattagttagatggacattgacaattaattgtgaaagcattaattagaagtcaagacaaaagaatgtttgtgatatcttctctcgcttaacatactttgatttcaccattgcatttcagcattttaaagaatagtgtatcagtatagaaggaggagcaaagctctttaagagtaatgatgaaaccaaaaggtcaaaaagtagaagaatagcgaatgtaagttattaaataaatgagcaagaagtatgtgtcagggaaaataaatgcttcttatattgttaataccgtgattccctgcccgctcaccccgtcactcaacacttgatgcatttgttttggaaagtgccattttatgctgagatactggtattgaaaacttccctctttcccaactctgtcagaagttctcttgctctttggaagaagccgagggccttaacaaatcagactgacctcccttgtgacaggcagcctcgcctgcccttggaaacaagctgccagaatgtgagggccacagagacccaagagaagccagcactgctagactgaggaacttgtaaatatcttctgctttcttggtgaacaaggacagaggcaattgcgtgtatattgtgactgtagtttgtgaagaaaatgcaaccatttgcttcgacagctcctcaaatgtacttgttaagtgtgaatgtgcctgcctcattgccttgtgttccaaacacagtactgaatgcgttgtttttaaataaaccatttcgttttgctttgggaaa

SEQ ID NO: 158 - DNA, 6051 bp, Homo sapiens
gctgcagaagctgccgccacctccaatgcacaaggtgtctcatctgaaaagaaacctgagccccagggaggcggcgcggagcgaccctggcagagctggcgcaaacagggcgagaggtcgctgggcagcgttcgaggaccagagggagctcggccacagaagaccccagtgatctgatcccgggatcccggctccaagctctcctcgcattttacagatttcacccccgcgactatctccccaaaacggagcctttatatcaagagaaggtgcgggagctggggcaaccaggactttctcgggcacccaagatgcgctccattaggaagaggtggacgatctgcacaataagtctgctcctgatcttttataagacaaaagaaatagcaagaactgaggagcaccaggagacgcaactcatcggagatggtgaattgtctttgagtcggtcacttgtcaatagctctgataaaatcattcgaaaggctggctcttcaatcttccagcacaatgtagaaggttggaaaatcaattcctctttggtcctagagataaggaagaacatacttcgtttcttagatgcagaacgagatgtgtcagtggtcaagagcagttttaagcctggtgatgtcatacactatgtgcttgacaggcgccggacactaaacatttctcatgatctacatagcctcctacctgaagtttcaccaatgaagaatcgcaggtttaagacctgtgcagttgttggaaattctggcattctgttagacagtgaatgtggaaaggagattgacagtcacaattttgtaataaggtgtaatctagctcctgtggtggagtttgctgcagatgtgggaactaaatcagattttattaccatgaatccatcagttgtacaaagagcatttggaggctttcgaaatgagagtgacagagaaaaatttgtgcatagactttccatgctgaatgacagtgtcctttggattcctgctttcatggtcaaaggaggagagaagcacgtggagtgggttaatgcattaatccttaagaataaactgaaagtgcgaactgcctatccgtcattgagacttattcatgctgtcagaggttactggctgaccaacaaagttcctatcaaaagacccagcacaggtcttctcatgtatacacttgccacaagattctgtgatgaaattcacctgtatggattctggcccttccctaaggatttaaatggaaaagcggtcaaatatcattattatgatgacttaaaatataggtacttttccaatgcaagccctcacagaatgccattagaattcaaaacattaaatgtgctacataatagaggagctctaaaactgacaacaggaaagtgtgtaaagcaataaagcacattttgaaacaaacaatatgcacttcttttctgaagatgcttccgaagatttgaaaataggatccaaaacacggctgggtttcagcatccaccaatgaactgaaaggtgaataaaggacgttcatgagaaatcgactaccagctgatgaaatacctgcaaagtgctctaaaaattaaatattttgactttaagggtcctagtaagtgccacttccactaagaatacagtttgaatgtataatcagtagtgtttacaagatccaacagtgcactcatcattagttaacaaagcaaatatgttcatcactgtcaggctgcccacagcaacaccaagcatattagaagaggaaccccaggaacgcaactcagaccttgggaaattaaaccatccttgtcagcagaagccaagatggaagcagtttgagcaatgaaatccgtaagattaaacaactcaagtaaatgcttcagtcaggactctgagtctgatcatgaattttatgttttaatttatgttttttttttgtcttctggaatctcttttggtttggatattgggatgcttagaaatcctttctgagatgcatatgagtgaggaaataaactttaagtaattatttttaaagttcttatactttttaaaagctatcacacaaagacttttttttttttttttgtctcgctctgttgcccaggctggagtacagtggcgcgatctcagctcactgcaagctccgcctcccaagttcactccattctcctgcctcagcctccggagtagctgggactgcaggcgcctgccaccacgcctggctaattttttgtatttttagtggagacggattttcaccgtgttagccaggatggtctcaatctcctgacctcgtgatccacccgccttggcctcccaaagtgctgggattacaggcgtgagccaccgtgcctggccgacatttttaaaaaagttttattttgcacggctctaaacctccatgttattttccagtggtgtagaaggtaccagctaaagtgaaccactatgtaatattaggccattctaaaggaaagatgttccatgtcatcagagatggtaaaataggcagggaaaaaaaaatctttggtaccaaagattacacttgtgtttctacacagcaaaccatttttctttcatgaaaataatatattattaacatgaatatattattttgctattaatgtgaaagttgtctctaaatattttttaattttcaaactcatactttattttcatttgaaatgtttttcacaccttttgcattacataataattttgtggaagcattttgccctttagaataaatattagattgatatagctgaaatgtgacttccagttctttgatattccccttgttattcaaatagaaatatggaaatgctttatatattactgttaaatttcttagtgcagaaataacattattaatagagtattgttttcaaaacagatgattaatttcaagaggtttaacagtgaaattgtgtcaatattttgcatttaaaatgaatttaattgaccgatattttctgtagttaaatttagtcacaatatcacatatgttcttcaagaaacacatgaaattattaataaagtaattaaaaaatttttaatgtataacagaattgaccaataggccagttttctggtaacttatgatagtagattgtttctttagaaactgggcagaagctctgcattctcacttgtactttgatttcttatttcttgggcaggcaatttgaggaaagaagaaatggcatggggaatatatatgttttgtttcttagggaaaacagtctgagaaatgaataaaaagcatgaagtacgtgtgtgtgtgtgtgtgttaccatggaaaaggatattcacagtagtacagttctcaatatttttaattagatgtcatatttttttaatatagtaaaaccttgggatatagaatattacatcttttgagaatgtatgtgtctctaagtaagtaaaatctaatgcgtataggagactgatagctaaaaatgaatggaacattaatgtacttttataattaaacctcttatctatcagaaattgtaagagaatagatacatgttttgaatgtaaagttgaaaagtctggtttacttaataaattgaaagtgatttataaaatctaaatttggactacttgcaaatgataagctattctagtagcctttagtttaaatccaacagaaatctagaagtcacaagcaaatatcttaaaggtaaaatccatctgggcactcatttaaagtatatcttaaaaaagcagcagcaaggtaccttgccatttttagcatattttcttcctttttcttttttcttttttttttttttttgagatggagtctcactctgtcacacaggctggaatgcagtgatgccatctcagctcactgcaacctccacctcctgggttcaagtgattctcgtgcctcagcctcccaagtagctggggttacaggcgcccaccaccacactcggctaattttgtgtttttagtagagacaaagtttcaccatgttggccaggctggtcttgaacttcctgacctcaggttatccacccacctcagcctcccaaagtgctgggattacaggtgtgagccaccgcagccggaccatttttagtatattttcagtaaatacatttaaacaatgttaaggccacagcacacatatctcagccattcattgttctgtgcattgatgtttatctcatagatgcattgagtagtgcctttttagctttttcacattactttgtcaccatatcctttgtgttctctaaatacattgcccacttccaaaaatgttcagcatgaaaaaaagggcttcagtgtcgattgagattgcttttgttcatctcagggatttcaatagtcaagaatgaattcagttaaaggtatttagggttcaaagaagacaaactgtacaagcccatttcattccttgttgtatacctttccatctgccctcccattttaactatctactgtggcctttttatggaaacagagcaagatcaatgaaggctaatggcaagaataagaaaaagagttgagatttaaccaatagcggagcataaaggatcatgacaaaatcaaattataaaagcatacttgaaataggtggagctttttcttttgaaaatatatattcacaattttaatattttaatttattttttactatttaaccctgtacttggcaatgctcaggcagctgattgtgaaatattcttgtcctttacagaacatggttgttattgtgctgttgacatgaatagaccatggaaacattttcatcattattattcagcctgtgctgtagttaatgttaagttgctgaaataaaaagtgagcaagtaatagattttcttggcaaatctaatgattcagcccacaggactgttgaaactactgcggaagtttttctatctgaaagaaggtgctgggcattcaaatgtgttcatgtattgtatatcatatgaattgtatatcaattactaatgggaatttctacatatatgcttacaaaagcaatttatttaagtaatgctaggggtagtgtacataccaattagttattcagctactatacagaaaaaggatgaacaaattaatttatttctaattgagccagttagacataatgcatataacgtgatatttggttcatgaaagagttgttttcatgtggttattgtagggagtatatataattgtggaaggggtatgggaagagttgtgtatagttagttgttatctctacaagtttgaaagttttcccatcaaacattatcaatataccaatgttttaaaaattgagtgagggttattatttgtatttgatgaaagaaaatccaaataaagcccacctagaaatagatattttattatatatgtgctatagatatacctatatagtacaaatagacatgtgtgatgcatatatacaatgttatatatgtgtatatgtctgtatacacactgagtctgtaatatgtatacactaaatttgtgttatgctaacatcttcagggtctgcactgtgaactcccctggagataagtaagtccactttagaataaagaagttcttttgagacttcagttactaacgtgctttaagaggtatctactttataactgaattctatgtcgttcatacgtagagttacagtaagggtctagtatgtccaaatcttaataataaagaagaaaagtaaaggcttcaagctagcaatgtattcgaattacagttttcagattgtggctccaggccttgtgtttctcatttaagtagcaccttttaataaaaaccgtttctttgtgtaggcaaaagcacaagtgtttcaaatgtaaatagcaggaaaaaaaaagagtttacagagatagcattgctgcacagaataattgctactgagtatttcttatagaatttgtggaactgaaagatgaggtttattctgtcaagttcaagttcattctgttcaacactgttttcttattgtttgtgtatagcaaccgggtattattgttttatcatttgtaaaattgtaaaataaattaatccctttttttcactgaaaaaaaaaaaaaaa

SEQ ID NO: 159 - DNA, 2627 bp, Homo sapiens
gtacgccccctccccccgtccctatcggcagaaccggaggccaaccttcgcgatcccttgctgcgggcccggagatcaaacgtggcccgcccccggcagggcacagcgcgctgggcaaccgcgatccggcgccggactggaggggtcgatgcgcggcgcgctggggcgcacaggggacggagcccgggtcttgctccccattggccgccacctcggcgggaggggccgcctccggctcgtggcacctggcgtctcccctccgcggggaaatcggcggctacccggcaccggcgcctggaggtaaaggtacccgggggtggggaaggcccctggccgcggcagagctccctgccaccggccctgtcctgcttgccgccccagcgcctgcgacgcttggatgcccccagctccggccgcgccaaccagaaactttgcccctcgaagtcccccgcctgcctgaccgcaccgtgaggcgccaagtcggccgcgcgccccccggggccccggaaccccgcgagtcattgcctggccgccccgtaccccgcgcccgcggcgcccggtagccaggatgcgctacgcggacccctcggccaaccgggatttgttggggagccgaactttgctcttcatcttcatctgcgcctttgccttggtgaccttgctgcaacagatcctgtatggcaggaactacattaagaggtactttgaattttatgaggggccttttgaatataactccacaagatgcctggagctgaggcacgaaatattggaagtgaaggtgctgtccatggtgaagcagtcagagctgttcgacaggtggaagagcctccagatgtgcaaatgggcgatgaacatctctgaggccaaccagttcaagtctactctgtccaggtgctgcaacgcccctgcctttctcttcaccacccagaagaacactcccctggggacaaagctcaagtatgaggtggacaccagtggcatctaccacatcaaccaggagatcttccgcatgtttcccaaggacatgccctactaccggtcccagtttaagaagtgtgctgtagtgggcaacggaggcatcttgaagaacagccgctgcgggagggagatcaacagcgccgacttcgtcttccggtgcaacctgccccccatctcagagaagtacaccatggatgtgggggtgaagacggatgtggtcactgtgaaccccagcatcatcacagagaggttccacaagctggagaagtggcggcggccgttctatcgcgtgctgcaggtgtacgagaacgcgtcggtgctgctgcctgccttctacaacacgcgcaacaccgacgtgtccatccgcgtcaagtacgtgctggacgacttcgaatcgccgcaagctgtctactacttccatccgcagtacctggtcaacgtgtcgcgctactggctcagcctgggggtgcgcgccaagcgcatcagcaccggcctcattctggtcactgcggcgctggagctctgtgaggaggtgcacctctttggcttctgggccttccccatgaacccctcgggcctctacatcactcaccactactatgacaacgtcaagccgcgtcccggcttccacgccatgccctctgagatcttcaacttcctgcacttgcacagccgaggcatcctccgcgtgcacacgggcacctgcagctgctgctgatggctgccagccaggctgcccggcaagcggcgccccctctcctgctgtccctcctggtggaactgggagccccgaaccgggcagcgtggggtcctggcgttcaggctgtctctccctccattgttcagctctgtacttggatcctggggtagggaggcagggttaggaaccggggcagagtcagctctgtgctgagcctcctggcctggcccccaccggtgcatccgcccagtgcgtccacctgccctggctagcatgctgctgggccacaccccaagatcaggggccctggggacggcaagtgaataaagcacatttccacccaattttgtcatccgagagagagcacaaactgcaggcccttgttgcagctgaaggaagaccctacagagaatggaattgagagtggagacaggacacttcacaggacacttgagcacagtcaagattttattcacacttttggttcctgtgttttatatcgaagacttagctatgaattgctatctaaatctcagagcttagaagccaacccagtgactagaccttccagtgaagaaagtgatctcaagaggtccagggacttaacagccaagccacaccacccgacaggttcttctgtgacaccgagagatctaacccaaggcctgggttatgtcttagtcgagacatcatcatctgagaagcaccacatcctttcagacacatcctcggacacacatgcggtcttggtgcccccaggttcaatcctgcgttagctcttttgatgagaaggaaataaaccaaaccagccacttgcactatggcttccaagccaatgttattgactcaataagtgcttagcaattggcttcctcttttgtcttcctattttcagctccatttaaaccaggagttatttataaagacctcttcctctcatgtaaaa

SEQ ID NO: 160 - DNA, 1398 bp, Homo sapiens
atgcggccggggggcgcactgctcgccctgctcgccagcctgctgctgctgctgctgctgcgcctgctctggtgcccggcagacgcgcccggccgcgccaggattctggtggaggaaagcagggaggccacccacggcacccccgcagcgctgaggacgctccggagcccggcgaccgcggtaccgcgcgccactaacagcacatatctgaatgagaagtcgctccaactgacggagaaatgcaaaaatctgcaatatggcattgagtctttctctaacaaaacgaaagggtattcagagaacgactaccttcagattatcacagatatacagagttgtccatggaaacggcaagcagaagaatatgcaaattttagagccaaacttgcttcctgctgtgatgctgttcaaaactttgttgtttctcagaataacactccagttgggactaatatgagttacgaggtggaaagcaaaaaagaaatcccaattaagaagaacatttttcatatgtttccagtgtcccagccttttgtggactacccttataatcagtgtgcagtggtcggaaatgggggaattctgaataagtctctctgtggaactgaaatagataaatccgacttcgtttttaggtgtaacctacccccaaccacaggagatgttagtaaagatgttggcagtaaaacaaatcttgtgactataaatccaagcatcataactctgaaatatgggaacttaaaggaaaaaaaagccctatttctggaggacattgcaacctatggagatgcattttttcttctgccagcattttccttcagggccaacacgggtacctctttcaaagtatactacacgctcgaagagtctaaagcaagacaaaaggttctatttttccatcccaagtacctgaaagatctggcccttttctggagaactaaaggtgtgactgcataccgcttgtccaccggcttgatgatcacaagtgttgcagtggaactgtgtaaaaatgtgaagctgtatggattctggcccttctctaaaactgtagaagacatacctgtcagccatcactattatgacaacaagctacctaaacatggtttccatcagatgcccaaagaatacagccagatcctccaacttcacatgaaaggaatcctcaaactgcaatttagcaaatgtgaagtcgcctaaacaaagtatcttaaaatgggaataattttaatataatgcagtaggtgattaacaatgtctccaaacaccaaaggaggtggctaaagagtattttgagatgagccccaaaatttggtttgaccaaagcttccccactcattttgcaatgatggcaagtcattcaatccttctcatcttcattttttctccttataacatgga

SEQ ID NO: 161 - DNA, 2323 bp, Homo sapiens
ctgtgctcccggcgctgacgtgtctgggcggtcggcttccactccttcaggcgtcggcagccactagtcgtggcgagaggggcggggtggccggggctggcgctccacttggcccccgctcccggcccgccccgccgccgcggccccccggatgagggtatatattcggagcgagcgcgggacgccgatgagtggccgcgcggaaggagctggagacggtcgtagctgcggtcgcgccgagaaaggtttacaggtacatacattacacccctatttctacaaagcttggctattagagcattatgaacattaatgacctcaaactcacgttgtccaaagctgggcaagagcacctactacgtttctggaatgagcttgaagaagcccaacaggtagaactttatgcagagctccaggccatgaactttgaggagctgaacttctttttccaaaaggccattgaaggttttaaccagtcttcttaccaaaagaatgtggatgcacgaatggaacctgtgcctcgagaggtattaggcagtgctacaagggatcaagatcagctccaggcctgggaaagtgaaggacttttccagatttctcagaataaagtagcagttcttcttctagctggtgggcaggggacaagactcggcgttgcatatcctaaggggatgtatgatgttggtttgccatcccgtaagacactttttcagattcaagcagagcgtatcctgaagctacagcaggttgctgaaaaatattatggcaacaaatgcattattccatggtatataatgaccagtggcagaacaatggaatctacaaaggagttcttcaccaagcacaagtactttggtttaaaaaaagagaatgtaatcttttttcagcaaggaatgctccccgccatgagttttgatgggaaaattattttggaagagaagaacaaagtttctatggctccagatgggaatggtggtctttatcgggcacttgcagcccagaatattgtggaggatatggagcaaagaggcatttggagcattcatgtctattgtgttgacaacatattagtaaaagtggcagacccacggttcattggattttgcattcagaaaggagcagactgtggagcaaaggtggtagagaaaacgaaccctacagaaccagttggagtggtttgccgagtggatggagtttaccaggtggtagaatatagtgagatttccctggcaacagctcaaaaacgaagctcagacggacgactgctgttcaatgcggggaacattgccaaccatttcttcactgtaccatttctgagagatgttgtcaatgtttatgaacctcagttgcagcaccatgtggctcaaaagaagattccttatgtggatacccaaggacagttaattaagccagacaaacccaatggaataaagatggaaaaatttgtctttgacatcttccagtttgcaaagaagtttgtggtatatgaagtattgcgagaagatgagttttccccactaaagaatgctgatagtcagaatgggaaagacaaccctactactgcaaggcatgctttgatgtcccttcatcattgctgggtcctcaatgcagggggccatttcatagatgaaaatggctctcgccttccagcaattccccgcttgaaggatgccaatgatgtaccaatccaatgtgaaatctctcctcttatctcctatgctggagaaggattagaaagttatgtggcagataaagaattccatgcacctctaatcatcgatgagaatggagttcatgagctggtgaaaaatggtatttgaaccagataccaagttttgtttgccacgataggaatagcttttatttttgatagaccaactgtgaacctacaagacgtcttggacaactgaagtttaaatatccacagggttttattttgcttgttgaactcttagagctattgcaaacttcccaagatccagatgactgaatttcagatagcatttttatgattcccaactcattgaaggtcttatttatataattttttccaagccaaggagaccattggccatccaggaaatttcgtacagctgaaatataggcaggatgttcaacatcagtttacttgcagctggaagcatttgtttttgaagttgtacatagtaataatatgtcattgtacatgttgaaaggtttctatggtactaaaagtttgttttattttatcaaacattaagcttttttaagaaaataattgggcagtgaaataaatgtatcttcttgtctctggaaaaaaaaaaaaaaaaaaaaaaaaaaaaaa

SEQ ID NO: 162 - DNA, 3682 bp, Homo sapiens
gcgagcgcagcggagcctggagagaaggcgctgggctgcgagggcgcgagggcgcgagggcagggggcaaccggaccccgcccgcacccatggcgcccgtcgccgtctgggccgcgctggccgtcggactggagctctgggctgcggcgcacgccttgcccgcccaggtggcatttacaccctacgccccggagcccgggagcacatgccggctcagagaatactatgaccagacagctcagatgtgctgcagcaaatgctcgccgggccaacatgcaaaagtcttctgtaccaagacctcggacaccgtgtgtgactcctgtgaggacagcacatacacccagctctggaactgggttcccgagtgcttgagctgtggctcccgctgtagctctgaccaggtggaaactcaagcctgcactcgggaacagaaccgcatctgcacctgcaggcccggctggtactgcgcgctgagcaagcaggaggggtgccggctgtgcgcgccgctgcgcaagtgccgcccgggcttcggcgtggccagaccaggaactgaaacatcagacgtggtgtgcaagccctgtgccccggggacgttctccaacacgacttcatccacggatatttgcaggccccaccagatctgtaacgtggtggccatccctgggaatgcaagcatggatgcagtctgcacgtccacgtcccccacccggagtatggccccaggggcagtacacttaccccagccagtgtccacacgatcccaacacacgcagccaactccagaacccagcactgctccaagcacctccttcctgctcccaatgggccccagccccccagctgaagggagcactggcgacttcgctcttccagttggactgattgtgggtgtgacagccttgggtctactaataataggagtggtgaactgtgtcatcatgacccaggtgaaaaagaagcccttgtgcctgcagagagaagccaaggtgcctcacttgcctgccgataaggcccggggtacacagggccccgagcagcagcacctgctgatcacagcgccgagctccagcagcagctccctggagagctcggccagtgcgttggacagaagggcgcccactcggaaccagccacaggcaccaggcgtggaggccagtggggccggggaggcccgggccagcaccgggagctcagattcttcccctggtggccatgggacccaggtcaatgtcacctgcatcgtgaacgtctgtagcagctctgaccacagctcacagtgctcctcccaagccagctccacaatgggagacacagattccagcccctcggagtccccgaaggacgagcaggtccccttctccaaggaggaatgtgcctttcggtcacagctggagacgccagagaccctgctggggagcaccgaagagaagcccctgccccttggagtgcctgatgctgggatgaagcccagttaaccaggccggtgtgggctgtgtcgtagccaaggtgggctgagccctggcaggatgaccctgcgaaggggccctggtccttccaggcccccaccactaggactctgaggctctttctgggccaagttcctctagtgccctccacagccgcagcctccctctgacctgcaggccaagagcagaggcagcgagttgtggaaagcctctgctgccatggcgtgtccctctcggaaggctggctgggcatggacgttcggggcatgctggggcaagtccctgactctctgtgacctgccccgcccagctgcacctgccagcctggcttctggagcccttgggttttttgtttgtttgtttgtttgtttgtttgtttctccccctgggctctgccccagctctggcttccagaaaaccccagcatccttttctgcagaggggctttctggagaggagggatgctgcctgagtcacccatgaagacaggacagtgcttcagcctgaggctgagactgcgggatggtcctggggctctgtgcagggaggaggtggcagccctgtagggaacggggtccttcaagttagctcaggaggcttggaaagcatcacctcaggccaggtgcagtggctcacgcctatgatcccagcactttgggaggctgaggcgggtggatcacctgaggttaggagttcgagaccagcctggccaacatggtaaaaccccatctctactaaaaatacagaaattagccgggcgtggtggcgggcacctatagtcccagctactcagaagcctgaggctgggaaatcgtttgaacccgggaagcggaggttgcagggagccgagatcacgccactgcactccagcctgggcgacagagcgagagtctgtctcaaaagaaaaaaaaaagcaccgcctccaaatgccaacttgtccttttgtaccatggtgtgaaagtcagatgcccagagggcccaggcaggccaccatattcagtgctgtggcctgggcaagataacgcacttctaactagaaatctgccaattttttaaaaaagtaagtaccactcaggccaacaagccaacgacaaagccaaactctgccagccacatccaaccccccacctgccatttgcaccctccgccttcactccggtgtgcctgcagccccgcgcctccttccttgctgtcctaggccacaccatctcctttcagggaatttcaggaactagagatgactgagtcctcgtagccatctctctactcctacctcagcctagaccctcctcctcccccagaggggtgggttcctcttccccactccccaccttcaattcctgggccccaaacgggctgccctgccactttggtacatggccagtgtgatcccaagtgccagtcttgtgtctgcgtctgtgttgcgtgtcgtgggtgtgtgtagccaaggtcggtaagttgaatggcctgccttgaagccactgaagctgggattcctccccattagagtcagccttccccctcccagggccagggccctgcagaggggaaaccagtgtagccttgcccggattctgggaggaagcaggttgaggggctcctggaaaggctcagtctcaggagcatggggataaaggagaaggcatgaaattgtctagcagagcaggggcagggtgataaattgttgataaattccactggacttgagcttggcagctgaactattggagggtgggagagcccagccattaccatggagacaagaagggttttccaccctggaatcaagatgtcagactggctggctgcagtgacgtgcacctgtactcaggaggctgaggggaggatcactggagcccaggagtttgaggctgcagcgagctatgatcgcgccactacactccagcctgagcaacagagtgagaccctgtctcttaaagaaaaaaaaagtcagactgctgggactggccaggtttctgcccacattggacccacatgaggacatgatggagcgcacctgccccctggtggacagtcctgggagaacctcaggcttccttggcatcacagggcagagccgggaagcgatgaatttggagactctgtggggccttggttcccttgtgtgtgtgtgttgatcccaagacaatgaaagtttgcactgtatgctggacggcattcctgcttatcaataaacctgtttgttttaaaaaaaa

SEQ ID NO: 163 - DNA, 1528 bp, Homo sapiens
cggcgagcgagcaccttcgacgcggtccggggaccccctcgtcgctgtcctcccgacgcggacccgcgtgccccaggcctcgcgctgcccggccggctcctcgtgtcccactcccggcgcacgccctcccgcgagtcccgggcccctcccgcgcccctcttctcggcgcgcgcgcagcatggcgcccccgcaggtcctcgcgttcgggcttctgcttgccgcggcgacggcgacttttgccgcagctcaggaagaatgtgtctgtgaaaactacaagctggccgtaaactgctttgtgaataataatcgtcaatgccagtgtacttcagttggtgcacaaaatactgtcatttgctcaaagctggctgccaaatgtttggtgatgaaggcagaaatgaatggctcaaaacttgggagaagagcaaaacctgaaggggccctccagaacaatgatgggctttatgatcctgactgcgatgagagcgggctctttaaggccaagcagtgcaacggcacctccacgtgctggtgtgtgaacactgctggggtcagaagaacagacaaggacactgaaataacctgctctgagcgagtgagaacctactggatcatcattgaactaaaacacaaagcaagagaaaaaccttatgatagtaaaagtttgcggactgcacttcagaaggagatcacaacgcgttatcaactggatccaaaatttatcacgagtattttgtatgagaataatgttatcactattgatctggttcaaaattcttctcaaaaaactcagaatgatgtggacatagctgatgtggcttattattttgaaaaagatgttaaaggtgaatccttgtttcattctaagaaaatggacctgacagtaaatggggaacaactggatctggatcctggtcaaactttaatttattatgttgatgaaaaagcacctgaattctcaatgcagggtctaaaagctggtgttattgctgttattgtggttgtggtgatagcagttgttgctggaattgttgtgctggttatttccagaaagaagagaatggcaaagtatgagaaggctgagataaaggagatgggtgagatgcatagggaactcaatgcataactatataatttgaagattatagaagaagggaaatagcaaatggacacaaattacaaatgtgtgtgcgtgggacgaagacatctttgaaggtcatgagtttgttagtttaacatcatatatttgtaatagtgaaacctgtactcaaaatataagcagcttgaaactggctttaccaatcttgaaatttgaccacaagtgtcttatatatgcagatctaatgtaaaatccagaacttggactccatcgttaaaattatttatgtgtaacattcaaatgtgtgcattaaatatgcttccacagtaaaatctgaaaaactgatttgtgattgaaagctgcctttctatttacttgagtcttgtacatacatacttttttatgagctatgaaataaaacattttaaactg

SEQ ID NO: 164 - DNA, 2166 bp, Homo sapiens
agtacagctccggccgccgcgccgcctggctttcgtattcgttgttctcggcgggctgtggggcctccgcgccgcggccgttagtcatgtcggattctggaagttacggtcagtctgggggtgagcagcaaagttattctacctatggaaatccaggcagccaaggctatggacaagcatcacaaagctattctggctatgggcaaacgactgattcctcttatggacagaactacagcggttactccagttatggacaaagttattcacagtcctatggtggttatgagaatcaaaagcagagctcatatagccagcaaccatataataaccagggacagcagcaaaacatggaatcatcaggaagccaaggtggaagagcaccttcctatgaccagccagactatggtcaacaagattcatatgaccagcagtcaggctatgatcaacatcaaggctcatatgatgagcagtcaaattatgatcagcagcatgattcctatagtcaaaaccagcagtcctatcattcacaaagggaaaactacagccaccacacacaagatgaccgtcgtgatgtgagtaggtatggagaagataatagaggatatggcgggtcacagggaggaggtagagggcgtgggggatatgacaaggatggaagaggtcctatgacaggatcaagtggtggtgaccgcggtggcttcaaaaattttggtggtcacagggattatggacccagaacagatgctgattcagaatctgataattcagataacaacacaatctttgtgcaaggacttggggagggtgtgtctacagatcaagttggggagttctttaaacaaataggaattatcaagacaaataagaagaccggaaaaccaatgataaatctttatacagacaaggacacaggaaagccaaagggggaggcaacagtgtcatttgatgaccctccttcagctaaggcagccattgactggtttgatggaaaagaattccatggcaacatcattaaagtgtcctttgccactagaagacctgaattcatgagaggaggtggaagtggaggtgggcggcgaggccgtggaggatatagaggtcgtggaggctttcaagggagaggtggagaccccaaaagtggggattgggtttgccctaatccgtcatgcggaaatatgaactttgctcgaaggaattcctgcaatcagtgcaatgagcctagaccagaggactctcgtccctcaggaggagatttccgggggagaggctacggtggagagaggggctacagaggtcgtgggggcagaggtggagaccgaggcggctatggtggagacagaagtgggggtggctatggtggagacagaagcagcggtggtggctacagcggagatagaagtgggggcggctatggtggagacagaagtgggggtggctatggtggggacagaggcggcggctatggtggggacagaggaggcggctatggaggagaccgaggaggtggctatggaggagatcgaggtggctatggaggagaccgaggtggaggctatggtggagaccgaggaggctatggaggagatcgaggaggttacggaggagatcgaggaggttatggaggagatcgaggaggctatggaggagacagaagccgggggggctatggaggagaccgtggtggtggcagtggctacggtggagaccgaagtggaggctatggaggagacaggagtggtggcggctatggaggagaccgaggtgggggctacggaggagaccgaggtggctatggaggcaaaatgggaggaagaaacgactacagaaatgatcagcgcaaccgaccatactgatgactgttttgaatgttcctttgtctctgacatgatccatagtgaaattgccagagttttgcctgctgctttcctcgtggcctcttcttgggtagtgaaattaagtgacatttggatttttatttgggtgggagggctgggacagtttttcttctagaaatgtctgttgagatttccccctttagtttccaaccttctccccaacccttggagctaaatgcgttgtaaaatattgccaaaatgaaaagtgttttgtaatactgcaataaaggctgcttgtttttgtggaaaaaaaaaaaaaaaaaaaaaa

SEQ ID NO: 165 - DNA, 3466 bp, Homo sapiens
agtgacgcaaggcctactgtcggctgggaggggaggtgtagccggtctttgggggtaggcggtagtggcggaagaggttcggcggctgatggcggatcaggatcggaagcctgcgtaactttctcccttgatccgggagtctttccactggattcacaatgacatcctttcaagaagtcccattgcagacttccaactttgcccatgtcatctttcaaaatgtggccaagagttaccttcctaatgcacacctggaatgtcattacaccttaactccatatattcatccacatccaaaagattgggttggtatattcaaggttggatggagtactgctcgtgattattacacgtttttatggtcccctatgcctgaacattatgtggaaggatcaacagtcaattgtgtactagcattccaaggatattaccttccaaatgatgatggagaattttatcagttctgttacgttacccataagggtgaaattcgtggagcaagtacacctttccagtttcgagcttcttctccagttgaagagctgcttactatggaagatgaaggaaattctgacatgttagtggtgaccacaaaagcaggccttcttgagttgaaaattgagaaaaccatgaaagaaaaagaagaactgttaaagttaattgccgttctggaaaaagaaacagcacaacttcgagaacaagttgggagaatggaaagagaacttaaccatgagaaagaaagatgtgaccaactgcaagcagaacaaaagggtcttactgaagtaacacaaagcttaaaaatggaaaatgaagagtttaagaagaggttcagtgatgctacatccaaagcccatcagcttgaggaagatattgtgtcagtaacacataaagcaattgaaaaagaaaccgaattagacagtttaaaggacaaactcaagaaggcacaacatgaaagagaacaacttgaatgtcagttgaagacagagaaggatgaaaaggaactttataaggtacatttgaagaatacagaaatagaaaataccaagcttatgtcagaggtccagactttaaaaaatttagatgggaacaaagaaagcgtgattactcatttcaaagaagagattggcaggctgcagttatgtttggctgaaaaggaaaatctgcaaagaactttcctgcttacaacctcaagtaaagaagatacttgttttttaaaggagcaacttcgtaaagcagaggaacaggttcaggcaactcggcaagaagttgtctttctggctaaagaactcagtgatgctgtcaacgtacgagacagaacgatggcagacctgcatactgcacgcttggaaaacgagaaagtgaaaaagcagttagctgatgcagtggcagaacttaaactaaatgctatgaaaaaagatcaggacaagactgatacactggaacacgaactaagaagagaagttgaagatctgaaactccgtcttcagatggctgcagaccattataaagaaaaatttaaggaatgccaaaggctccaaaaacaaataaacaaactttcagatcaatcagctaataataataatgtcttcacaaagaaaacggggaatcagcagaaagtgaatgatgcttcagtaaacacagacccagccacttctgcctctactgtagatgtaaagccatcaccttctgcagcagaggcagattttgacatagtaacaaaggggcaagtctgtgaaatgaccaaagaaattgctgacaaaacagaaaagtataataaatgtaaacaactcttgcaggatgagaaagcaaaatgcaataaatatgctgatgaacttgcaaaaatggagctgaaatggaaagaacaagtgaaaattgctgaaaatgtaaaacttgaactagctgaagtacaggacaattataaagaacttaaaaggagtctagaaaatccagcagaaaggaaaatggaaggtcagaattcccagagtcctcaatgtttcaaaacatgctcagagcaaaatggttatgttctcacattgtcaaatgcacaaccagttctgcaatatggtaatccttatgcatctcaggaaacaagagatggagcagatggtgctttttacccagatgaaatacaaaggccacctgtcagagtcccctcttggggactggaagacaatgttgtctgcagccagcctgctcgaaactttagtcggcctgatggcttagaggactctgaggatagcaaagaagatgagaatgtgcctactgctcctgatcctccaagtcaacatttacgtgggcatgggacaggcttttgctttgattccagctttgatgttcacaagaagtgtcccctctgtgagttaatgtttcctcctaactatgatcagagcaaatttgaagaacatgttgaaagtcactggaaggtgtgcccgatgtgcagcgagcagttccctcctgactatgaccagcaggtgtttgaaaggcatgtgcagacccattttgatcagaatgttctaaattttgactagttactttttattatgagttaatatagtttagcagtaaaaaaaaaaaaaaaaaccacacctaaaatagaccactgaggagaccatagagcggatgctttcatgcaccctttactgcactttctgaccaggagctactttgagtttggtgttactaggatcagggtcagtctttggcttatcaataaattttaatctctgttaatcttacctgctttaaaaaaaagttcttgtgtgttcgtatctttatttattccctagtttgcagaactgtctgaataaaggatacaaggattatttcaatgttactgcactgaaaaacgtgtatgtattagtgtgctagattatttagcagaatattcacaagtttctgttgaccttgttgattgagcatgactactaaatattatgtaataaaaagcatttgtcataacagtcttatgaagtagttcttcgaatatagaaagttctataatttagcccatgaaatgataggtttttaattttcagaaatggagctgcatgtagaatgagatcacatgcttttatatgtgaaatattggttttagcaattaacagaaggcatactttgctaattttatggcaaaattttagaataacctgaatgattatttttaaactatcttgaagttgtatgtatatatctaatgggaaaatggaacaagagatgtcagtataattgttttcctattaaatgatctcataacaggggtgtttgtggcataaaaatcatagaatatatatcagtatcttttttacattttcctgatgagaatataaatttgaaatattctcagtaagtgattaaaagtacaatacataaacccaaatcaaagtaatgtgtttcttcagttatgtctgtgctgtatagaactgtcactaacattaaagaaagaggacacatttttcaagatctgtaa

SEQ ID NO: 166 - DNA, 8382 bp, Homo sapiens
cgcagcggcggcggcagcggcggcggcggctacagcagctccgccggcagccgcgggagcacggcgacgccagcggcgggaagggaaaaggccgaggcatcagcgtgtgaagaccgcaaagacgatcccgagtacagttgtgaacagcattgctgctaggctcctcctgcagatcatctgaaatgaacctctcttattgatttttattggcctagagccaggagtactgcattcagttgactttcagggtaaaaagaaaacagtcctggttgttgtcatcataaacatatggaccagtgtgatggtgaaatgagatgaggctccgcaatggaactgtagccactgctttagcatttatcacttccttccttactttgtcttggtatactacatggcaaaatgggaaagaaaaactgattgcttatcaacgagaattccttgctttgaaagaacgtcttcgaatagctgaacacagaatctcacagcgctcttctgaattaaatacgattgtgcaacagttcaagcgtgtaggagcagaaacaaatggaagtaaggatgcgttgaataagttttcagataataccctaaagctgttaaaggagttaacaagcaaaaaatctcttcaagtgccaagtatttattatcatttgcctcatttattgaaaaatgaaggaagtcttcaacctgctgtacagattggcaacggaagaacaggagtttcaatagtcatgggcattcccacagtgaagagagaagttaaatcttacctcatagaaactcttcattcccttattgataacctgtatcctgaagagaagttggactgtgttatagtagtcttcataggagagacagatattgattatgtacatggtgttgtagccaacctggagaaagaattttctaaagaaatcagttctggcttggtggaagtcatatcaccccctgaaagctattatcctgacttgacaaacctaaaggagacatttggagactccaaagaaagagtaagatggagaacaaagcaaaacctagattactgttttctaatgatgtatgctcaagaaaagggcatatattacattcagcttgaagatgatattattgtcaaacaaaattattttaataccataaaaaattttgcacttcaactttcttctgaggaatggatgattctagagttttcccagctgggcttcattggtaaaatgtttcaagcgccggatcttactctgattgtagaattcatattcatgttttacaaggagaaacccattgattggctcctggaccatattctctgggtgaaagtctgcaaccctgaaaaagatgcaaaacattgtgatagacagaaagcaaatctgcgaattcgcttcagaccttcccttttccaacatgttggtctgcactcatcactatcaggaaaaatccaaaaactcacggataaagattatatgaaaccattacttcttaaaatccatgtaaacccacctgcggaggtatctacttccttgaaggtctaccaagggcatacgctggagaaaacttacatgggagaggatttcttctgggctatcacaccgatagctggagactacatcttgtttaaatttgataaaccagtcaatgtagaaagttatttgttccatagcggcaaccaagaacatcctggagatattctgctaaacacaactgtggaagttttgccttttaagagtgaaggtttggaaataagcaaagaaaccaaagacaaacgattagaagatggctatttcagaataggaaaatttgagaatggtgttgcagaaggaatggtggatccaagtctcaatcccatttcagcctttcgactttcagttattcagaattctgctgtttgggccattcttaatgagattcatattaaaaaagccaccaactgatcatctgagaaaccaacacattttttcctgtgaatttgttaattaaagatagttaagcatgtatcttttttttatttctacttgaacactacctcttgtgaagtctactgtagataagacgattgtcatttccacttggaaagtgaatctcccataataattgtatttgtttgaaactaagctgtcctcagattttaacttgactcaaacatttttcaattatgacagcctgttaatatgacttgtactattttggtattatactaatacataagagttgtacatattgttacattctttaaatttgagaaaaactaatgttacatacattttatgaagggggtacttttgaggttcacttattttactattatagaccctcttttatagattatcagggattatatatataaatatataaatatacataaaaatgttatggaattaatttattagaaacacttaagaagtacatatttttgtgcagtagatttttgaatcgatactttttttgaaaaccagtttccttgcttttttaagttctttctatatttttctttggaaatgcaaacattacaaaccaatgccatttttcaaatgcactgccatttaagattgattatagatggatttcttaattgaagtacttttataatcacagtgactgaacaaaatattttcaaagacatttgtcattccttaaagccaagattttaaagactaatgtccttcctgagggttactttactatactgtgtatggtgtatagccacagaaagtcagtctgataaattttcaatgtgtaagtgtgatgcattcaacccagattattgtagacttaacttattatatttcctctgatatgtaaaatgacaaactcttctttcctttttaatctttgtctttaatccatgaattaggtgcattatctgctgttgattcttttatatctgcactcattttatgacgtcagacaaaatgttttctaggtgttgctattgtatgagtcataattggtataattttaaagaaaattgtaatattgttttttggtgaaatatattattagtagtatattttccaaaatgattttattgtagtatgaactgataagtgagtcccgtgtccaagagactgtatttattactcttaaacacgctattccaaatgatattactactataaacaaagaatattaccggtctcagcaatcagtgatctttataaaagtacttttaaaaaatgatgaattatcaccaggcgctgtggctcacgcctgtaatcccagcactttgggaggccgaggcgggcggatcacgaggtcaggagatcaagaccatcctggctaacacggtgaaaccctgtctctactaaaaatacaaaaaattagccaggcgtggtggcaggtgcctgtaatcccagctacttgggaggctgaggcaggagaatggcgtgaacccaggaggcagagctggcagtgagctgagatcgcaccactgcactccagcctgggcgacacagctagactccgtctcaaaaaaaaaaaaagatgaagtatcaacatcagttcccagccagtctgcttggacacactggggtgccacaagtgggttgcaggttggttgcagacgggcagagatggattctgctgagctttcagagtgaccactggctggggcctagcgctggggcaaggttccagctggctgcctctagcctggaggagcttcatctagttacccaatgtgctgaaccaacagcatgaaatagcatcatttcctgtgctgtgttacaaagtgcaaacgtttggaaacactgatacagtacaattatttccatcactccatgttgttataatttttagttacttttcttgattgaaaagtcaatcacattgccaaaaatgatttttatgtcagttaaaggccagttgaaatttttttattaggatgttttaaatttacttttcactttcttgaatttttttcttctcaaatttccttggcccagtgcccatgagcaaatttcattcaaaaacaggaataaccttttgtcataaaattttggcaccagcttggtatactaaattactgcaaagataactgagtaccagaagtaaaaatctctgcaggtgggcttaggagtactcttgggtccctggttcctcagttgccaactctggtttcatgaagaaagaccatgctctgaaaatctagggaggagaaagttattgcagcacctggtgtgatttgttacaacttctttaaagacagcctgcctggctagctttttcctgttttcatgcagtttgccctcccagcattggtccacctgttgttcccaagaaactcattcttgttcccaagactccttttagccaaatctttcctatcattccaggacttttttgtgcttctctccccatgaatctacccgtgcctagggtgtgtgccaggcacgtggcaggtggccagtcagcatctggatgtgagaccaattattccagcctgccctcctctttctctttttatcattttgtattatttttgagacagggtctcgctttgttgcccaggctggagtgcagtggtgctctcatagctcactgcagcctcgatctctggcctcaagcaatcctcctgcctcagcctcccaaagtgctgggattataggtgtgtgccaccatgtccagccccctttctctctcttaactccctctccctgctgtcgttgccatactcttgcatacacaatcggttgtctagtttttgattgtttgtgtgtatggtgtgtgctgtctctctgaccagatttcaggttcctgaggcgagcctgcagctcatactgctcatctgtcctctcctatggtgggtgctcagggcctctcactgttagttactccctcctttctgcccagttctgcactcaactagtagaagcagccatcctttccccaagcaggaaattgtagtggtcgcccttaagagcagtgtgagggcagaagattaagggaggggaagagtccctggaactggaagaaggtaaatactttgccttgagagggcgccgaatcattttaccaaaatagtaaatggaaaaagtgtcaaaggttgggactagttttaaaaacacatatagccagtagacacatgggggctgtttaaataaaaacatttttttacccggttctgccatcacacacactagtgacattccaagtactcagtggccatgtggagctagtggccaccacacttgacaccacggatgcagaacttttccatcactgcagaaagctctgttgaacagtactgtgtccagagtgctaattatgaacagcttagaaaccacaattaatacattctcatgaggttaaaagcagacatgggaatagaacataatgcaaatgatgatgaatattttgggtgagaagagaaagctgaggacccatttctaggattctaagatgtaagatttcttaagttctttatcttagtctcatgcattctccacatcacgcgctgtaccatactgtgtagtcagaacagacagtgtgattgaaaagctttggaaaaagttaacacaaaggattatttagcacataggctgtagatacgtatgtgtgtatttgttcaacaattggagatggttgaatacccttgaacaaagtgtgtatcttctcaaatcagtggttgcactagtcaataattagaaggtgttgttatttttaaaactataagcaaaattatgaaggcctttaaaaaatctatcataataatgaaaaagaggttgtctcccaacagtgctgtccctcaaagaaaagactggttatgtggaaacagcacgtttggagagattattctagtgaataacagtgtatatttgtggtaggcaaatttctaagaatgacccctactgacacccccaccaatgaccttgtataatatcctcccactttgagcatgggtggaacctgtttgatccatgattatatcatgttatgtagcaaaaggaagactgtctgggggtggctaatcaaatcttgtgactcctttaaaagcagagagttttctcgggctggtggcagaagtcaagagacaaagcagaaggacctcaggcaccattgctgttttaaggtagagggggctgcatgagaaggaatgcacatggctttgaggagctgagagaggccttggctaacagcaaaggagctgggaactgcagtcctacagccacgggaactgaattcagcccataagctcattcataggcttggaaaggcattcatctccagtctccagataagacccagcctggccaacactttgaatccagccttgtgagaccctaagccgagaactcacttaagcctgcttggacttctgacctacagaactatgagataataaatcagtggtgttttaagctgctaaatttgtggcaatttgttatgtaggaataggaaatgaatacagtattttaaaagaggtaaagaggaaatcttcatacttgattccctgtagtatgctggatatttcttggtaaatgcatgaataaagtctttagtagcaagtcatgtacctggaccttgttggggatgttctcgccagagatctcaattagtcttcattggacgtttgttggcaaagttgcagcatcttactgagtagcgtttggtaaaggaactgctagaatgagactataggaataggactgaaacagtgtgtaagggatcttttttatttctagaagaggtgttactttatactgatttagactgctctgagcctgtcagaagtaaattcaagaatgattaacagtggtattttagatacattaagagcaaaaataacctttgccttgtagagatcagataatctgtgtatcgagggatttaattttttttaaccaaaacttagtttctctttttatcatctagcacagatcaaatcctgtatgggccagccaaatgtttgtagtttgagaatgttttgcaaatacctctctgcttccaagccattaatagctaatgaagttttattttggtttgtccattaatttttctgcttatttttactgtattgccatgtccttgatacgagacaagtagaactaaaagagagaaaatgagaggttaagactgtcagaagatgagaaatgtgagtcataaccataccttagtgttttaagggaactttatccagtccaatccctttatagaaaaggaacttttccaagttatgttgcagtatttatagtgtgtaaaattttgtttgactttggtagttgtgcattttaaattatgaatcttatatgctacgataactagtatgcttactttctttaatgcatgtgatcatacaatgctaaaaaggtattttttaaagacccaaccaaactgaggattttgttatacatatctgtatcaacacctatatataaactcttcttcttacctgaaacactccttcacccggtttgggcactaactagatcattttcaaaggaacaaacaggaaggagcaagctggcactccagggtgcatctgagctgagaatttagaagacctcattcaagaaagtaaactgagcattgatgggaaagcactttgcgcgaagtaacattcccactgttaatgttgcagtcaaaattgtggaaaaaaaaaagtggtgctaaaattgttctgaaatgaagattgtttgttgtggggaatattttaatactcttggactttagggaggctattttatgtgtcacttgctcctagttgtttcattgtattagtaattagcaaactgtcctggaaccaagggtttggtacttttgcctgattagcattccattatttatttgaaatgctcagtgtttgctcaaatttggtgaaaatatcttttgaagacatattctctgagccttaaaaatggctgctatcgacagtactgtaagatgcactgccagtagatttgatacttttcatttcagtgtaggcagtaatgttttctaagaaagatttagaaatcagcaaagtgtaacaattgtgtttcatttatggaatggaaaaactgaagtgtcccattcagaacactttggaaaggttgtctgcattaggggatgtttctggaagcatcccttagagaagctgcctgaggaatctccttgccaggttgtaccagatttttttttttcttaaatgtattgtatatattttccttaaaatgtcttcattggctgaatgattcctatccgtagtaatattttaggtacttgttggatttttaaaggaagattatttattttcagatttgctgctataattgaaaacctagtaactggtcctgttgattgtgccttcatcactgtttctctgtgccacgaccgttcatgtgtatttgaaataaagaagtttaaaaagccatgttgaattcaagattccttctaataaaaataggtgaaacttaa

SEQ ID NO: 167 - DNA, 5445 bp, Homo sapiens
ggccgaggagccgtcgccgccatttcaagaccgtactaggtagatggtcaattagagttcccagggtttgaagcctgtaactgctgccgccgctcaagccctccagagcattgctacggctgctgcccttgtactactacctccaaatacgttcttgctggtagtggcggcagcaggaccaattacctcttttttgctctccctcgagaagctccagatggcgtcttccgtgggcaacgtggccgacagcacagggttagctgagttggcacatcgagaatatcaggcaggagattttgaggcagctgagagacactgcatgcagctctggagacaagagccagacaatactggtgtgcttttattactttcatctatacacttccagtgtcgaaggctggacagatctgctcactttagcactctggcaattaaacagaacccccttctggcagaagcttattcgaatttggggaatgtgtacaaggaaagagggcagttgcaggaggcaattgagcattatcgacatgcattgcgtctcaaacctgatttcatcgatggttatattaacctggcagccgccttggtagcagcgggtgacatggaaggggcagtacaagcttacgtctctgctcttcagtacaatcctgatttgtactgtgttcgcagtgacctggggaacctgctcaaagccctgggtcgcttggaagaagccaaggcatgttatttgaaagcaattgagacgcaaccgaactttgcagtagcttggagtaatcttggctgtgttttcaatgcacaaggggaaatttggcttgcaattcatcactttgaaaaggctgtcacccttgacccaaactttctggatgcttatatcaatttaggaaatgtcttgaaagaggcacgcatttttgacagagctgtggcagcttatcttcgtgccctaagtttgagtccaaatcacgcagtggtgcacggcaacctggcttgtgtatactatgagcaaggcctgatagatctggcaatagacacctacaggcgggctatcgaactacaaccacatttccctgatgcttactgcaacctagccaatgctctcaaagagaagggcagtgttgctgaagcagaagattgttataatacagctctccgtctgtgtcccacccatgcagactctctgaataacctagccaatatcaaacgagaacagggaaacattgaagaggcagttcgcttgtatcgtaaagcattagaagtcttcccagagtttgctgctgcccattcaaatttagcaagtgtactgcagcagcagggaaaactgcaggaagctctgatgcattataaggaggctattcgaatcagtcctacctttgctgatgcctactctaatatgggaaacactctaaaggagatgcaggatgttcagggagccttgcagtgttatacgcgtgccatccaaattaatcctgcatttgcagatgcacatagcaatctggcttccattcataaggattcagggaatattccagaagccatagcttcttaccgcacggctctgaaacttaagcctgattttcctgatgcttattgtaacttggctcattgcctgcagattgtctgtgattggacagactatgatgagcgaatgaagaagttggtcagtattgtggctgaccagttagagaagaataggttgccttctgtgcatcctcatcatagtatgctatatcctctttctcatggcttcaggaaggctattgctgagaggcacggcaacctgtgcttagataagattaatgttcttcataaaccaccatatgaacatccaaaagacttgaagctcagtgatggtcggctgcgtgtaggatatgtgagttccgactttgggaatcatcctacttctcaccttatgcagtctattccaggcatgcacaatcctgataaatttgaggtgttctgttatgccctgagcccagacgatggcacaaacttccgagtgaaggtgatggcagaagccaatcatttcattgatctttctcagattccatgcaatggaaaagcagctgatcgcatccatcaggatggaattcatatccttgtaaatatgaatggctatactaagggcgctcgaaatgagctttttgctctcaggccagctcctattcaggcaatgtggctgggataccctgggacgagtggtgcgcttttcatggattatattatcactgatcaggaaacttcgccagctgaagttgctgagcagtattccgagaaattggcttatatgccccacactttttttattggtgatcatgctaatatgttccctcacctgaagaaaaaagcagtcatcgattttaagtccaatgggcacatttatgacaatcggatagttctgaatggcatcgacctcaaagcatttcttgatagtctaccagatgtgaaaattgtcaagatgaagtgtcctgatggaggagacaatgcagatagcagtaacacagctcttaatatgcctgttattcctatgaatactattgcagaagcagttattgaaatgattaaccgaggacagattcaaataacaattaatggattcagtattagcaatggactggcaactactcagatcaacaataaggctgcaactggagaggaggttccccgtaccattattgtaaccacccgttctcagtacgggttaccagaagatgccatcgtatactgtaactttaatcagttgtataaaattgacccttctactttgcagatgtgggcaaacattctgaagcgtgttcccaatagtgtactctggctgttgcgttttccagcagtaggagaacctaatattcaacagtatgcacaaaacatgggcctgccccagaaccgtatcattttttcacctgttgctcctaaagaggaacacgtcaggagaggccagctggctgatgtctgcttggacactccactctgtaatgggcacaccacagggatggatgtcctctgggcagggacccccatggtgactatgccaggagagactcttgcttctcgagttgcagcatcccagctcacttgcttaggttgtcttgagcttattgctaaaaacagacaagaatatgaagacatagctgtgaagctgggaactgatctagaatacctgaagaaagttcgtggcaaagtctggaagcaaagaatatctagccctctgttcaacaccaaacaatacacaatggaactagagcggctctatctacagatgtgggagcattatgcagctggcaacaaacctgaccacatgattaagcctgttgaagtcactgagtcagcataaataaagactgcacaggagaattacccctatacctgagcctcaaccttctgggggaaagggaactagataacatacttcttacttgtctgtacagtaccttgttgcagatgggtgatatataatggtaatagaatagcacagccagacttgcttcctgcatggtagggagagacacaaaagatgggaaactgcttttccacaaggaatctccgtagaattttgcggcgaccagatggtgcataggtctggaaggtctgatctcccttggtcttccatgggatggttagtgtggaggggagatatagattgtccggccgctttgtgattccatggattgattcagtcttctggatttttttttctttatattttgggtactggagcttttaaaaatgtttggtttcaggtatttttattcatgtgaagtgtatatgattctcttgagataaggttttaagctaaaatgttactccctgttttagtttctgaactctgacagattgacagggactttgctggtgtagtctttttataggttttataaaccacttgagcctatatcagtcgttttagtgtctgacctaatatttggagctatcagtgctttgttgatttagatgatgactcaagattttttctggtccatttcccatttccttttcttccctgacccccataccctcacccttaaaattctcctgtaactcaactaacaaaatcaagcctgattcaaaacatcctagggtgttttaaacacaccatctggtgccaaatgaagatttttaggagtgattactaattatcaagggcacagttgtggtactgtcattgataataatatagtttttttttttttcctaattttgacctgtttcaccagtgttttacccttgactgccccttctatgctgcttccaaaagtgatagtgtgtgtaagatttttaccttcctttctaaagttttttttttttttttttaagtgagtcctgttcttcctatttctttcagcagaaatgaaatcccaggtaagtataagtattcaagtatttgatcagtaagtcacagttatctccagtgcattaaataaccttcatcaagaaataggttataggtaaaatctctgaaggatcatctatgtattcaagtaattattttttagataataactgtcttctggacttggtcttgaagtctgtacagattcagcctcagtagtagcgaactgcactgctgtttggtttggagtacaaattagacttatagtcctcctggaacttgagttattaaaatcataggaataaaattatgggatctcaacaaagggtcgagggtttgaggcttaaacaagccaacatatgaatatatgttttgtctcgctatactgcacttacgctatccagttgcaggtaattttttgtctgctagtagtgttctagattatgtctttccaaagcgctgaggctgtgcacctattctgtagttgcagctgatgcctgaatgtatcctagctgacaaattattgattaataagaacttgaatttctggaagattcttactgttaaccaaattttgagcaaggagtctcaaaggtaattctgaaccagaattacatgttaatgaacagtgtaccttttaacagtgtaaatcacggaatatccgtgaagggatttcttaatttattttttaccggttgattgaaatatcagttaaaggttgccagcatggttgcagataaactgatgtttgaaattcgctgaaatacttaatgtggaataggataatatacttccaatgccctcaaggctgtgaccttacagccattttacatagcacatcattcctcctatagggatgaactttttcctggcacgaaaagtagccgctctggttgaagctttgcttattgtaacaggcttttatttccaggtaatatgtcttggaagacttaattctgattagagatatagatattactggaaactaattgttttttttctattgtactctgctttatcaaagaagtaaaacatttaaatcgtactacagaaattaagatgttgtcttgcgatccttaataaatgaatgatttcccttttaaaaaaaaaaaaaaaaaaaa

SEQ ID NO: 168 - DNA, 1990 bp, Homo sapiens
ggagtgcccaggatggagtgcagtggctattcacaggtttaatcatagctcactaccgtcttgaatccctgggctcaagtgatcctcctgcctcagcccctgagtagctggtactaaagttaccttccacgctgtatgtccgtgagaaatacaatgaagacggtctgaataatgaactggtaatcttcgataatatgaaacgaatttaagagaacatatcaaagagaaggctctcaaaataggctgctgcaaaagctggtatattgtccggttgctctctcagaatctcgcgtgtcagcccttcaagaagattcccaaatccttgtggaattcggtagtgggtgttggagaatggaatcgacatcttcttggtattggttttcgctttgcttcatacatcaataatgatatggtgctgcagaaggagcctgctggggcagtgatatggggcttcggtacacctggagccacagtgaccgtgaccctgcgccaaggtcaggaaaccatcatgaagaaagtgaccagtgtgaaagctcactctgatacgtggatggtggtactggatcctatgaagcctggaggacctttcgaagtgatggcacaacagactttggagaaaataaacttcaccctgagagttcatgacgtcctgtttggagatgtctggctctgtagtgggcagagtaacatgcagatgactgtgttacagatatttaatgctacaagggagttgtctaacactgcggcatatcagtctgtccgcatcctctctgtctctcccattcaagcagagcaggagctggaggaccttgttgcggttgacttgcagtggtctaagcccacctcagaaaacttaggccatggatatttcaagtacatgtcagcagtgtgctggctctttggacgtcacctttatgacactctgcagtatcccatcgggctgatcgcctccagctggggcgggacacccattgaagcctggtcatctggacggtcactgaaagcctgtggggtccctaaacaagggtccattccatacgattctgtaactggtcccagtaagcactctgttctctggaatgccatgatccatccactgtgcaatatgactctgaaaggggtagtatggtaccagggggagtccaatataaattataacacggatctgtacaattgcacattccctgcactcatcgaagactggcgtgaaaccttccaccgtggttcccaggggcagacggagcgtttcttcccatttggacttgtccagttatcttcagatttgtctaagaagagctcagacgatggatttccccagatccgttggcatcaaacagcagacttcggctatgtccccaacccaaagatgcccaatactttcatggctgtagctatggatctctgtgatagagactcgccttttggcagcatccaccctcgagataaacagactgtggcttatcggctgcatttgggggcccgtgctctggcttatggtgagaagaatttgacctttgaaggaccactgcctgagaagatagaactcttggctcacaaggggctgctcaatctcacatattaccagcaaatccaggtgcagaaaaaggacaacaagatatttgagatctcctgttgcagtgaccatcgatgcaagtggcttccagcttctatgaacaccgtctccacccagtccctgaccctggcgatcgattcttgtcatggcactgtggttgctctccgctatgcttggaccacgtggccttgtgaatataagcagtgtcccctataccaccccagtagtgccctgccagcccctcccttcattgctttcattacagaccagggtcctggacatcagagcaatgttgctaaatgactgtttcagtatgatcagaacttagatataaggatgggtccttcagattttagcatttaggagtttcaataataaccattgcttttaaaggaaagtaaaaaaaaaaaaaaaaaa

SEQ ID NO: 169 - DNA, 2926 bp, Homo sapiens
gcgaaaacaaacagctggggctgcgagcgcccccgccccggccccgagagcacgccggcccagtcccccacctggggcgcccgtctgcccaccatgaggaagatccgcgccaatgccatcgccatcctgaccgtagcctggatcctgggcactttctactacttatggcaggacaaccgagcccacgcagcatcctccggcggccggggcgcgcagagggcaggcaggaggtcggagcagctccgcgaggaccgcaccatcccgctcattgtgacaggaactccctcgaaaggctttgatgagaaggcctacctgtcggccaagcagctgaaggctggagaggacccctacagacagcacgccttcaaccagctggagagtgacaagctgagcccagaccggcccatccgggacacccgccattacagctgcccatctgtgtcctactcctcggacctgccagccaccagcgtcatcatcaccttccacaatgaggcccgttccaccctgctgcgcacagtgaagagtgtcctgaaccgaactcctgccaacttgatccaggagatcattttagtggatgacttcagctcagatccggaagactgtctactcctgaccaggatccccaaggtcaagtgcctgcgcaatgatcggcgggaagggctgatccggtcccgagtgcgtggggcggacatggctgcagctaccgttctcacctttctggatagccactgcgaagtgaacaccgagtggctgccgcccatgctgcagcgggtgaaggaggaccacacccgcgtggtgagtcccatcattgatgtcatcagtctggataattttgcctaccttgcagcatctgctgaccttcgtggagggttcgactggagcctgcatttcaagtgggagcagatccctcttgagcagaagatgacccggacagaccccaccaggcccataaggacgcctgtcatagctggaggaatcttcgtgatcgacaagtcctggtttaaccacttgggaaagtatgatgcccagatggacatctgggggggagagaattttgagctctccttcagggtgtggatgtgtggtggcagtctggagatcgtcccctgcagccgggtgggccatgtcttcaggaaacggcacccctacaacttccctgagggtaatgccctcacctacatcaggaatactaagcgcactgcagaagtgtggatggatgaatacaagcaatactactatgaggcccggccctcggccatcgggaaggccttcggcagtgtggctacgcggatagagcagaggaagaagatgaactgcaagtccttccgctggtacctggagaacgtctacccagagctcacggtccccgtgaaggaagcactccccggcatcattaagcagggggtgaactgcttagaatctcagggccagaacacagctggtgacttcctgcttggaatggggatctgcagagggtctgccaagaacccgcagcccgcccaggcatggctgttcagtgaccacctcatccagcagcaggggaagtgcctggctgccacctccaccttaatgtcctcccctggatccccagtcatactgcagatgtgcaaccctagagaaggcaagcagaaatggaggagaaaaggatctttcatccagcattcagtcagtggcctctgcctggagacaaagcctgcccagctggtgaccagcaagtgtcaggctgacgcccaggcccagcagtggcagctgttgccacacacatgacggagggattttcttgaagggtcagctattgcactgtgctgggaggctggctgtggctcctgtttgtgaagagaactcccagttccttttcacagccgctgagaacacatccacacatctaccccacggccttgtcttggaactgctcctgctatccccacaccctgcttcctcaccccactggctcttgggcaaatgactgttggtaccaggaccctgggggtctcccctacaaagcagaccagcctggggcagatatacctaccacaggagccccctgtctttcataggccaaggatccacatacccatagagttcatggattctagagggtctaggaatctcttgaaattgtccctaaaatactgcatgtgtgtgcatacatgcattttcctggggaaaaagtccatggcttctaaaagaggtccctgatccccaaagggcctgaacctctgctctggattgaagccactgtctgcccaagctgccaccccctaatcttcctccctggcgtgctcaaactgccatcgcctgctccctccacacggcccttggggtcagcagccaagtgtctgtggtccgcagcacctgctctggagggctctccagcagtttcgcctcctgactctcaccagcgtcctctcggcagcactcccgtgcccaagtgcacccctctggacttgccagcgcaggccccttcgctcccagggccatgctttgcctgtcctctgtcgtgatgtttcttccgcagccaggtgcagcctcagatcccctgttcatctgggaagcctcctgccacagcttaggacagaactgggcccagggcaaaggcctctccccagaggatggactagaaggcctgggccacactcgggcatggacctttggggctggggagccggggctgcgcctgttgaatgtaagaggactgctgaccagagggccttcaagagggtctctctgtcctttgctgtggtcagatcaggctctgcacttatcagccggtcctttgtggcaacgcagccctgttctgtttttgcttttcctcttcttgaccaaagcatgtgccactagctgtccttgaggacctcgtctttatgaaacacacacctggaataaaaccacttcttacatgtcaaaaaaaaaaaaaaaaaaa

SEQ ID NO: 170 - DNA, 6736 bp, Homo sapiens
atgggcttcttgcccaagcttctcctcctggcctcattcttcccagcaggccaggcctcatggggcgtctccagtccccaggacgtgcagggtgtgaaggggtcttgcctgcttatcccctgcatcttcagcttccctgccgacgtggaggtgcccgacggcatcacggccatctggtactacgactactcgggccagcggcaggtggtgagccactcggcggaccccaagctggtggaggcccgcttccgcggccgcaccgagttcatggggaaccccgagcacagggtgtgcaacctgctgctgaaggacctgcagcccgaggactctggttcctacaacttccgcttcgagatcagtgaggtcaaccgctggtcagatgtgaaaggcaccttggtcacagtaacagaggagcccagggtgcccaccattgcctccccggtggagcttctcgagggcacagaggtggacttcaactgctccactccctacgtatgcctgcaggagcaggtcagactgcagtggcaaggccaggaccctgctcgctctgtcaccttcaacagccagaagtttgagcccaccggcgtcggccacctggagaccctccacatggccatgtcctggcaggaccacggccggatcctgcgctgccagctctccgtggccaatcacagggctcagagcgagattcacctccaagtgaagtatgcccccaagggtgtgaagatcctcctcagcccctcggggaggaacatccttccaggtgagctggtcacactcacctgccaggtgaacagcagctaccctgcagtcagttccattaagtggctcaaggatggggtacgcctccaaaccaagactggtgtgctgcacctgccccaggcagcctggagcgatgctggcgtctacacctgccaagctgagaacggcgtgggctctttggtctcaccccccatcagcctccacatcttcatggctgaggtccaggtgagcccagcaggtcccatcctggagaaccagacagtgacactagtctgcaacacacccaatgaggcacccagtgatctccgctacagctggtacaagaaccatgtcctgctggaggatgcccactcccataccctccggctgcacttggccactagggctgatactggcttctacttctgtgaggtgcagaacgtccatggcagcgagcgctcgggccctgtcagcgtggtagtcaaccacccgcctctcactccagtcctgacagccttcctggagacccaggcgggacttgtgggcatccttcactgctctgtggtcagtgagcccctggccacactggtgctgtcacatgggggtcatatcctggcctccacctccggggacagtgatcacagcccacgcttcagtggtacctctggtcccaactccctgcgcctggagatccgagacctggaggaaactgacagtggggagtacaagtgctcagccaccaactcccttggaaatgcaacctccaccctggacttccatgccaatgccgcccgtctcctcatcagcccggcagccgaggtggtggaaggacaggcagtgacactgagctgcagaagcggcctaagccccacacctgatgcccgcttctcctggtacctgaatggagccctgcttcacgagggtcccggcagcagcctcctgctccccgcggcctccagcactgacgccggctcataccactgccgggcccgggacggccacagtgccagtggcccctcttcgccagctgttctcactgtgctctacccccctcgacaaccaacattcaccaccaggctggaccttgatgccgctggggccggggctggacggcgaggcctccttttgtgccgtgtggacagcgacccccccgccaggctgcagctgctccacaaggaccgtgttgtggccacttccctgccatcagggggtggctgcagcacctgtgggggctgttccccacgcatgaaggtcaccaaagcccccaacttgctgcgtgtggagattcacaaccctttgctggaagaggagggcttgtacctctgtgaggccagcaatgccctgggcaacgcctccacctcagccaccttcaatggccaggccactgtcctggccattgcaccatcacacacacttcaggagggcacagaagccaacttgacttgcaacgtgagccgggaagctgctggcagccctgctaacttctcctggttccgaaatggggtgctgtgggcccagggtcccctggagaccgtgacactgctgcccgtggccagaactgatgctgccctttacgcctgccgcatcctgactgaggctggtgcccagctctccactcccgtgctcctgagtgtactctatcccccggaccgtccaaagctgtcagccctcctagacatgggccagggccacatggctctgttcatctgcactgtggacagccgccccctggccttgctggccttgttccatggggagcacctcctggccaccagcctgggtccccaggtcccatcccatggtcggttccaggctaaagctgaggccaactccctgaagttagaggtccgagaactgggccttggggactctggcagctaccgctgtgaggccacaaatgttcttggatcatccaacacctcactcttcttccaggtccgaggagcctgggtccaggtgtcaccatcacctgagctccaagagggccaggctgtggtcctgagctgccaggtacacacaggagtcccagaggggacctcatatcgttggtatcgggatggccagcccctccaggagtcgacctcggccacgctccgctttgcagccataactttgacacaagctggggcctatcattgccaagcccaggccccaggctcagccaccacgagcctagctgcacccatcagcctccacgtgtcctatgccccacgccacgtcacactcactaccctgatggacacaggccctggacgactgggcctcctcctgtgccgtgtggacagtgaccctccggcccagctgcggctgctccacggggatcgccttgtggcctccaccctacaaggtgtggggggacccgaaggcagctctcccaggctgcatgtggctgtggcccccaacacactgcgtctggagatccacggggctatgctggaggatgagggtgtctatatctgtgaggcctccaacaccctgggccaggcctcggcctcagctgacttcgacgctcaagctgtgaatgtgcaggtgtggcccggggctaccgtgcgggaggggcagctggtgaacctgacctgccttgtgtggaccactcacccggcccagctcacctacacatggtaccaggatgggcagcagcgcctggatgcccactccatccccctgcccaacgtcacagtcagggatgccacctcctaccgctgcggtgtgggcccccctggtcgggcaccccgcctctccagacctatcaccttggacgtcctctacgcgccccgcaacctgcgcctgacctacctcctggagagccatggcgggcagctggccctggtactgtgcactgtggacagccgcccgcccgcccagctggccctcagccacgccggtcgcctcttggcctcctcgacagcagcctctgtccccaacaccctgcgcctggagctgcgagggccacagcccagggatgagggtttctacagctgctctgcccgcagccctctgggccaggccaacacgtccctggagctgcggctggagggtgtgcgggtgatcctggctccggaggctgccgtgcctgaaggtgcccccatcacagtgacctgtgcggaccctgctgcccacgcacccacactctatacttggtaccacaacggtcgttggctgcaggagggtccagctgcctcactctcattcctggtggccacgcgggctcatgcaggcgcctactcttgccaggcccaggatgcccagggcacccgcagctcccgtcctgctgccctgcaagtcctctatgcccctcaggacgctgtcctgtcctccttccgggactccagggccagatccatggctgtgatacagtgcactgtggacagtgagccacctgctgagctggccctatctcatgatggcaaggtgctggccacgagcagcggggtccacagcttggcatcagggacaggccatgtccaggtggcccgaaacgccctacggctgcaggtgcaagatgtgcctgcaggtgatgacacctatgtttgcacagcccaaaacttgctgggctcaatcagcaccatcgggcggttgcaggtagaaggtgcacgcgtggtggcagagcctggcctggacgtgcctgagggcgctgccctgaacctcagctgccgcctcctgggtggccctgggcctgtgggcaactccacctttgcatggttctggaatgaccggcggctgcacgcggagcctgtgcccactctcgccttcacccacgtggctcgtgctcaagctgggatgtaccactgcctggctgagctccccactggggctgctgcctctgctccagtcatgctccgtgtgctctaccctcccaagacgcccaccatgatggtcttcgtggagcctgagggtggcctccggggcatcctggattgccgagtggacagcgagccgctcgccagcctgactctccaccttggcagtcgactggtggcctccagtcagccccagggtgctcctgcagagccacacatccatgtcctggcttcccccaatgccctgagggtggacatcgaggcgctgaggcccagcgaccaaggggaatacatctgttctgcctcaaatgtcctgggctctgcctctacctccacctactttggggtcagagccctgcaccgcctgcatcagttccagcagctgctctgggtcctgggactgctggtgggcctcctgctcctgctgttgggcctgggggcctgctacacctggagaaggaggcgtgtttgtaagcagagcatgggcgagaattcggtggagatggcttttcagaaagagaccacgcagctcattgatcctgatgcagccacatgtgagacctcaacctgtgccccacccctgggctgaccagtggtgttgcctgccctccggaggagaaagtggccagaatctgtgatgactccagcctatgaatgtgaatgaggcagtgttgagtcctgcccgcctctacgaaaacagctctgtgacatctgactttttatgacctggccccaagcctcttgcccccccaaaaatgggtggtgagaggtctgcccaggagggtgttgaccctggaggacactgaagagcactgagctgatctcgctctctcttctctggatctcctcccttctctccatttctccctcaaaggaagccctgccctttcacatccttctcctcgaaagtcaccctggactttggttggattgcagcatcctgcatcctcagaggctcaccaaggcattctgtattcaacagagtatcagtcagcctgctctaacaagagaccaaatacagtgacttcaacatgatagaattttatttttctctcccacgctagtctggctgttacgatggtttatgatgttggggctcaggatccttctatcttccttttctctatccctaaaatgatgcctttgattgtgaggctcaccatggccccgctttgtccacatgccctccagccagaagaaggaagagtggaggtagaagcacacccatgcccatggtggacgcaactcagaagctgcacaggacttttccactcacttcccattggctggagtattgtcacatggctactgcaagctacaagggagactgggaaatgtagtttttattttgagtccagaggacatttggaattggacttccaaaggactcccaactgtgagctcatccctgagacttttgacattgttgggaatgccaccagcaggccatgttttgtctcagtgcccatctactgagggccagggtgtgcccctggccattctggttgtgggcttcctggaagaggtgatcactctcacactaagactgaggaaataaaaaaggtttggtgttttcctagggagagagcatgccaggcagtggagttgcctaagcagacatccttgtgccagatttggcccctgaaagaagagatgccctcattcccaccaccaccccccctacccccagggactgggtactaccttactggcccttacaagagtggagggcagacacagatgttgtcagcatccttattcctgctccagatgcatctctgttcatgactgtgtgagctcctgtccttttcctggagaccctgtgtcgggctgttaaagagaatgagttaccaagaaggaatgacgtgcccctgcgaatcagggaccaacaggagagagctcttgagtgggctagtgactccccctgcagcctggtggagatggtgtgaggagcgaagagccctctgctctaggatttgggttgaaaaacagagagagaagtggggagttgccacaggagctaacacgctgggaggcagttgggggcgggtgaactttgtgtagccgaggccgcaccctccctcattccaggctcattcattttcatgctccattgccagactcttgctgggagcccgtccagaatgtcctcccaataaaactccatcctatgacgcaaaaaaaaaaaaaaaaaa

SEQ ID NO: 171 - DNA, 2327 bp, Homo sapiens
agcccagcgaggcctgtgctgcgaggggctgtgctgtgccaggggaggccccgcacccgggaagcccagaggagagtgtgcactcacggagccctcctggcagggccgcgtctctggagcagcagacccgtgtccctctgggaggtcaactgcggcctcacagctgggcctgtcccagcacagcccttgttggagggcgcacccccgtgtcctcagcaccccagtgttgagtgcattgacctgcagaggggagcctgtgctggtcccgggcgtctgtgtggctcctgggtgcccatctgcacccctggccctgctctgggcttcagtggagccgtgccaccgtgggagtgtccagggtcctgacgtagccctgagacgtggccagctccctggcctgctgcccgcacagtgggcccttgtctctgctctgggtcaggcgaggcagccacccatgatgagctctgcagccttcccaaggtggctgagcatgggggtccctcgtaccccttcacggacagtgctcttcgagcgggagaggacgggcctgacctaccgcgtgccctcgctgctccccgtgccccccgggcccaccctgctggcctttgtggagcagcggctcagccctgacgactcccacgcccaccgcctggtgctgaggaggggcacgctggccgggggctccgtgcggtggggtgccctgcacgtgctggggacagcagccctggcggagcaccggtccatgaacccctgccctgtgcacgatgctggcacgggcaccgtcttcctcttcttcatcgcggtgctgggccacacgcctgaggccgtgcagatcgccacgggaaggaacgccgcgcgcctctgctgtgtggccagccgtgacgccggcctctcgtggggcagcgcccgggacctcaccgaggaggccatcggtggtgccgtgcaggactgggccacattcgctgtgggtcccggccacggcgtgcagctgccctcaggccgcctgctggtacccgcctacacctaccgcgtggaccgccgagagtgttttggcaagatctgccggaccagccctcactccttcgccttctacagcgatgaccacggccgcacctggcgctgtggaggcctcgtgcccaacctgcgctcaggcgagtgccagctggcggcggtggacggtgggcaggccggcagcttcctctactgcaatgcccggagcccactgggcagccgtgtgcaggcgctcagcactgacgagggcacctccttcctgcccgcagagcgcgtggcttccctgcccgagactgcctggggctgccagggcagcatcgtgggcttcccagcccccgcccccaacaggccacgggatgacagttggtcagtgggccccgggagtcccctccagcctccactcctcggtcctggagtccacgaacccccagaggaggctgctgtagacccccgtggaggccaggtgcctggtgggcccttcagccgtctgcagcctcggggggatggccccaggcagcctggccccaggcctggggtcagtggggatgtggggtcctggaccctggcactccccatgccctttgctgccccgccccagagccccacgtggctgctgtactcccacccagtggggcgcagggctcggctacacatgggtatccgcctgagccagtccccgctggacccgcgcagctggacagagccctgggtgatctacgagggccccagcggctactccgacctggcgtccatcgggccggctcctgaggggggcctggtttttgcctgcctgtacgagagcggggccaggacctcctatgatgagatttccttttgtacattctccctgcgtgaggtcctggagaacgtgcccgccagccccaagccgcccaaccttggggacaagcctcgggggtgctgctggccctcctgacaggccttctggccgtgcccatgccccttgggtgcctggggcagaggggtggaatacgttggggtgccccacgatagctgtggggggggctcttagtgcaagatcctgtggattagaaacaagttgctcctcagagctctcaagcagggactgctctttaggaaggggagcagcggctgggagtgagcagggcagggtgggggcagggtgggggcacgaagtgggccctgggtgacccccacagctcccttccgaggctgcagggccaggcgcgggaccgcaggtagcccagggtgttgtgggtggcagcacttgtttactggctgctttctggctcgaaataaaggaatcgtgcttgtgaaaaaaaaaaaaaaaaaaaaaaaaa

SEQ ID NO: 172 - DNA, 641 bp, Homo sapiens
atttaaattctgcagctcagagattcacacagaagtctggacacaattcagaagagccacccagaaggagacaacaatgtccctgctacccgtgccatacacagaggctgcctctttgtctactggttctactgtgacaatcaaagggcgaccacttgcctgtttcttgaatgaaccatatctgcaggtggatttccacactgagatgaaggaggaatcagacattgtcttccatttccaagtgtgctttggtcgtcgtgtggtcatgaacagccgtgagtatggggcctggaagcagcaggtggaatccaagaatatgccctttcaggatggccaagaatttgaactgagcatctcagtgctgccagataagtaccaggtaatggtcaatggccaatcctcttacacctttgaccatagaatcaagcctgaggctgtgaagatggtgcaagtgtggagagatatctccctgaccaaatttaatgtcagctatttaaagagataaccagacttcatgttgccaaggaatccctgtctctacgtgaacttgggattccaaagccagctaacagcatgatcttttctcacttcaatccttactcctgctcattaaaacttaatcaaacttcaaaaaaaaaaaa

SEQ ID NO: 173 - DNA, 1696 bp, Homo sapiens
actgtgtggccccgcaacccagcacaaccaggtatctgcttggaacccagccaccataaagcctgctagctaaaaaaaattttacatctctcagttcattcggcacagacccctgcctcattcagctgtgactctgcttggaaaattcatcagttacaaagcagccaatgcaattatctcaagggaaattgaaaaatggacctttgaaaatgctagatttacaatgagaaatgccataattcaaggtttattctatgggtccttgacatttgggatctggacagctctgttattcatatatttgcaccataatcatgtgagcagctggcagaagaaaagccaggagcctctgtcagcttggtcccctggaaaaaaagtgcatcagcaaattatctatggctcagagcaaataccaaaacctcatgtaatagtcaaaaggactgatgaagataaagcaaagtctatgttaggtacagattttaaccatacaaacccagaacttcataaagaacttttaaaatatggatttaatgtgattatcagtagaagcttgggcatcgaaagagaagtgccagataccaggagtaaaatgcgtcttcaaaaacattacccagcccgcctcccgactgccagcattgtcatttgcttctataatgaagaatgtaatgccttgtttcagaccatgtccagtgtcacgaacctcacgccacactattttcttgaagaaattattttggtagatgacatgagcaaagttgatgatttgaaagaaaaactagactatcacctggaaacttttcggggaaaggttaaaataataagaaacaaaaagagagaggggctgattcgagcaaggctgattggagcttctcatgcttcaggggatgttctggtgttcctggacagccactgtgaggtgaacagagtatggctggagcccctgctgcatgccattgccaaggaccccaaaatggtggtgtgccccctgatagatgtcattgatgatagaactctggagtataagccctctcctcttgtaaggggaacttttgattggaacctacaatttaaatgggataatgttttctcttatgagatggatggaccagaaggatctactaaaccaatccggtcacctgcaatgtctggaggaatttttgctatacgtcggcattattttaatgaaattggacagtatgacaaggatatggatttttggggaagagaaaatttggaactttcactaaggatctggatgtgtggaggccaactctttataatcccctgctctcgagtaggacatatcagtaagaaacaaactggaaaaccttctacaatcatcagtgctatgacacataactacctaagactggtgcacgtttggctggatgaatataaggagcagttttttcttcgaaagcctggtctgaaatatgtcacctacggaaatattcgcgagcgtgttgagttaaggaaacgactgggttgcaagtcatttcagtggtatttggataatgtcttcccagagttggaggcatctgtgaacagcctgtgaaaggaaaacaaatcactttcattaataaagggttaaaagtctcctagtcattcaacatagtgtcacaagagtgtaagtttggaacatcgtggaattacgtgaaatgcaattaaaaaaatatgaccaaaaaaaaaaaaaaaa

SEQ ID NO: 174 - DNA, 3298 bp, Homo sapiens
atggcttcactgagaagagtcaaagtgctgttggtgttgaacttgatcgcggtagccggcttcgtgctcttcctggccaagtgccggcccatcgcggtgcgcagcggagacgccttccacgagatccggccgcgcgccgaggtggccaacctcagcgcgcacagcgccagccccatccaggatgcggtcctgaagcgcctgtcgctgctggaggacatcgtgtaccggcagctgaatggcttatccaaatcccttgggctcattgaaggttatggtgggcggggtaaagggggccttccggctactctttccccggctgaagaagaaaaggctaagggaccccatgagaagtatggctacaattcatacctcagtgaaaaaatttcactggaccgttccattccggattatcgtcccaccaagtgtaaggagctcaagtactccaaggacctgccccagatatccatcatattcatcttcgtgaacgaggccctgtcggtgatcctgcggtccgtgcacagtgccgtcaatcacacgcccacacacctgctgaaggaaatcattctggtggatgacaacagcgacgaagaggagctgaaggtccccctagaggagtatgtccacaaacgctaccccgggctggtgaaggtggtaagaaatcagaagagggaaggcctgatccgcgctcgcattgagggctggaaggtggctaccgggcaggtcactggcttctttgatgcccacgtggaattcaccgctggctgggctgagccggttctatcccgcatccaggaaaaccggaagcgtgtgatcctcccctccattgacaacatcaaacaggacaactttgaggtgcagcggtacgagaactcggcccacgggtacagctgggagctgtggtgcatgtacatcagccccccaaaagactggtgggacgccggagacccttctctccccatcaggaccccagccatgataggctgctcgttcgtggtcaacaggaagttcttcggtgaaattggtcttctggatcctggcatggatgtatacggaggagaaaatattgaactgggaatcaaggtatggctctgtgggggcagcatggaggtccttccttgctcacgggtggcccacattgagcggaagaagaagccatataatagcaacattggcttctacaccaagaggaatgctcttcgcgttgctgaggtctggatggacgattacaagtctcatgtgtacatagcgtggaacctgccgctggagaatccgggaattgacatcggtgatgtctccgaaagaagagcattaaggaaaagtttaaagtgtaagaatttccagtggtacctggaccatgtttacccagaaatgagaagatacaataataccgttgcttacggggagcttcgcaacaacaaggcaaaagacgtctgcttggaccaggggccgctggagaaccacacagcaatattgtatccgtgccatggctggggaccacagcttgcccgctacaccaaggaaggcttcctgcacttgggtgccctggggaccaccacactcctccctgacacccgctgcctggtggacaactccaagagtcggctgccccagctcctggactgcgacaaggtcaagagcagcctgtacaagcgctggaacttcatccagaatggagccatcatgaacaagggcacgggacgctgcctggaggtggagaaccggggcctggctggcatcgacctcatcctccgcagctgcacaggtcagaggtggaccattaagaactccatcaagtagagggagggagctggggcactggagcctggcccccaggacatggctgctccccccaacatctggaccagctgccctggcggagagacagcaaggggccggcaggtgctcgatgggccccccagggcttctccagggcagcacagggaccccggatgaagactctgtcccccctcaggcattcagctgcccacaagtttcctgcaccctggaaaagccccccacccttcctctgggaaactgacagctgtcttccacagcctctgatgtggacctggtactgaggagcaagactgtccagttctcctccacatctcccatcccagaatcaggatctgggactggcagggtcccctcctgtgtctcatctcttgcagcagcagctgctgaactccagccatcaacacggtgggaggcagcgggggcttcagccatgtcctagctccccgccctaaaaggaggcagtgaggaccaggcactatttcctccgaggttacttctacccagatgacacctgcctgttcacgccccaaggcagctactgcccctaacccttcccaccagggtagctttgggcactgcagctctggacttttctggcccctcctgagatgacctgatggagctgatgctttctctcctaatccctgggcactaggctcttatcagtgtgcttgggccagctctcctgcctgtgtctagaggaagccagagacagaaataggctaagcctgcagtaggatctcagccacaagggccccgcaggatggagctgggtcaaggaccagggagccctgactcccagaggctgccaccggggagaagcagcggtcctccatccagaacctaagggctgaagcaaaggctgccaggacccttgaagatgcttttggctcacctcatttcaccccacgctctgctggctggcagaggagaaggcagtcgtttcctctctgaagagtatttttttcgattgccctctggttagggtgcacatataaatcagagttaatatatgaacgcgtgtgcatgcacaagtgtgtgtgtgcctgcgtgctgtgcgtggcagggtgtgtgtgtgtgtgtctggctgtgcgttccggagtgtgtgacgatgctgacctagctgtgtggccttgggcttgctgcttcattactcacctggatggggacgagggatgagaagggtgtgggtttggccccatgtcactggccggaaggatgtgtctcagccctgccctgtggggtgcccccgatgggaggctgtcccatctcccagtccccatctctttttccccacactgtccctggccaagccctgcccagagctgaaccctgtagctgcccccttgccctgtgtgggattcgcagtgtctcatttggtgacgtcttactggtgatcatctcctcaccccatctcccaccttgtggaataaatacatgttagcacttcccaaaaaaaaaaaaaaaaaaaaaaaaaaaaagaaaaaaaaaaaaaaaaaaa

SEQ ID NO: 175 - DNA, 3131 bp, Homo sapiens
agtgtttatcagaacttagccagggccagccaagcaggcacagatgctctgctatgaaatgccacgcaggcagagactgacaagcggtaggaactgagctttccccttggactgctgcttcctgctgtgttcaggggagggggtcactttctggcaactctgctgctgctgctgctgctgctgctacttcagcttcctctccactcaaggtaagcaggctaagggagggcaggctgctagggaaagctttgtaccatgaacaggatccgaaagtttttccgaggaagtgggcgagtcttggcatttatctttgtagcttctgtcatctggctcctctttgacatggcagctctccgcctctcattcagtgagatcaacactcgggtcatcaaggaagacattgtgaggagggagcggataggattcagagttcagccagaccaaggaaaaattttttacagcagcataaaagagatgaaacctcccctaaggggacatgggaaaggggcatggggcaaagagaatgttagaaaaactgaggagagtgtgctcaaggttgaggtggacttggaccaaacccagagggaaagaaaaatgcagaatgccctgggaaggggcaaggttgtgccgttgtggcatcctgcacatctgcagaccctccctgtgactcctaacaagcagaagacagacgggagaggcaccaaacctgaagcctcctctcaccaggggacaccaaagcaaacgacagctcagggggctccaaagacctcattcatagcagcaaaaggaactcaggtagtcaaaatatcagtacacatgggacgtgtcagtttaaaacaggagccccggaagagtcatagtcccagcagtgacacatcaaaactagcagctgaaagggacttgaatgtgaccatcagtcttagtactgatagaccaaagcagcgatcacaggcagtagcaaacgagagggcacaccctgccagcacagcagtgccgaagtctggggaagccatggccttaaacaaaactaagactcagagcaaagaagtcaatgcaaataaacacaaagccaatacgagtcttccttttcctaagttcactgtcaattcaaatcgcttaaggaagcaatctattaatgagacacctttgggaagtttgtcaaaggatgatggagctagaggggctcatgggaagaaactcaatttctctgaaagccatcttgtgattataaccaaagaggaagagcaaaaggcagaccccaaagaggtctctaattctaaaaccaaaacaatatttcctaaagtattgggtaaaagccaaagtaaacacatttccaggaatagaagtgagatgtcttcctcttcacttgctccacatagagtgccactgtcccaaactaaccatgctttaactggagggctagagccagcaaaaatcaacataactgccaaagccccctctacagaatacaaccagagtcatataaaagcccttttacctgaagacagtggaacgcaccaggtgttaagaattgatgtgacactttctccaagggaccccaaagctccagggcagtttgggcgtcctgtagttgtcccccatggaaaggagaaggaggcagaaagaagatggaaagaaggaaacttcaatgtctaccttagcgatttgatcccagtggatagagccattgaagacaccagacctgctggatgtgcagagcagctagttcacaataacctcccaaccaccagtgtcatcatgtgctttgtggatgaagtgtggtccactctcctgagatctgttcacagtgtcatcaatcgctctcctccacacctcatcaaggagattctgctggtagatgacttcagcaccaaagactatctaaaagataatttggataaatacatgtcccagtttccaaaagttcggattcttcgcctcaaagagagacatggcttaataagggccaggctggcaggagcacagaatgcaacaggtgatgtgttgacatttttagattctcatgtggaatgtaacgttggttggttggaacctcttctggaaagagtttatttaagtagaaagaaagtggcctgtccagtaatcgaagtcatcaatgataaggatatgagttacatgacagtggataactttcaaagaggcatctttgtgtggcccatgaactttggttggagaacaattcctccagatgtcattgcaaaaaacagaattaaagaaactgatacaataaggtgccctgtcatggctggtggattgttttctattgacaaaagttacttttttgaacttggaacatacgaccctggccttgatgtttggggtggggaaaatatggagctctcattcaaggtgtggatgtgtggtggtgaaattgagatcattccctgctcccgagtgggccatatattcagaaatgacaatccatattccttccccaaagaccggatgaagacagtggagcggaacttggtgcgggttgccgaggtctggctggatgagtataaggagctgttctatggccacggagaccacctcatcgaccaagggctagatgttggcaacctcacccagcaaagggagctgcgaaagaaactgaagtgcaaaagtttcaaatggtacttggagaatgtctttcctgacttaagggctcccattgtgagagctagtggtgtgcttattaatgtggctttgggtaaatgcatttccattgaaaacactacagtcattctggaagactgcgatgggagcaaagagcttcaacaatttaattacacctggttaagacttattaaatgtggagaatggtgtatagcccccatccctgataaaggagccgtaaggctgcacccttgtgataacagaaacaaagggctaaaatggctgcataaatcaacatcagtctttcatccagaactggtgaatcacattgtttttgaaaacaatcagcaattattatgcttggaaggaaatttttctcaaaagatcctgaaagtagctgcctgtgacccagtgaagccatatcaaaagtggaaatttgaaaaatattatgaagcctgaagtgtaactgatgtttttatatagtaaacccattaaatactgtgaaaataaca

SEQ ID NO: 176 - DNA, 5249 bp, Homo sapiens
cttccctccccgactgtgcgccgcggctggctcgggttcccgggccgacatgggcgccgccgcgtgggcacggccgctgagcgtgtctttcctgctgctgcttctgccgctcccggggatgcctgcgggctcctgggacccggccggttacctgctctactgcccctgcatggggcgctttgggaaccaggccgatcacttcttgggctctctggcatttgcaaagctgctaaaccgtaccttggctgtccctccttggattgagtaccagcatcacaagcctcctttcaccaacctccatgtgtcctaccagaagtacttcaagctggagcccctccaggcttaccatcgggtcatcagcttggaggatttcatggagaagctggcacccacccactggccccctgagaagcgggtggcatactgctttgaggtggcagcccagcgaagcccagataagaagacgtgccccatgaaggaaggaaacccctttggcccattctgggatcagtttcatgtgagtttcaacaagtcggagctttttacaggcatttccttcagtgcttcctacagagaacaatggagccagagattttctccaaaggaacatccggtgcttgccctgccaggagccccagcccagttccccgtcctagaggaacacaggccactacagaagtacatggtatggtcagacgaaatggtgaagacgggagaggcccagattcatgcccaccttgtccggccctatgtgggcattcatctgcgcattggctctgactggaagaacgcctgtgccatgctgaaggacgggactgcaggctcgcacttcatggcctctccgcagtgtgtgggctacagccgcagcacagcggcccccctcacgatgactatgtgcctgcctgacctgaaggagatccagagggctgtgaagctctgggtgaggtcgctggatgcccagtcggtctacgttgctactgattccgagagttatgtgcctgagctccaacagctcttcaaagggaaggtgaaggtggtgagcctgaagcctgaggtggcccaggtcgacctgtacatcctcggccaagccgaccactttattggcaactgtgtctcctccttcactgcctttgtgaagcgggagcgggacctccaggggaggccgtcttctttcttcggcatggacaggccccctaagctgcgggacgagttctgattctggccggagcaccagaccctctgatcctggagggaccagagtctgagctggtccttccagccaggcctggcagccagaggtgctccgggattgcaaactcctcttctcacctgccaaagatggagaagagtgccagggacccctcaaggagggagacgctccatatcccagggcataggacttgcaggttcctaggagcaggagcatctcccatcgcacgtgctttctgctcttctgggaatttctcacactggcaaagcagtccagcctccgtcttctggtccactctgctctgagcagcctgggatgctgaactcttcagagagatttttttatagagagatttctataattttgatacaaggtcatgactatcctagaactctctgtggtttttgaaaatcattgaattctattaatgtaggtacctaaagtgaccttaactgaatgtggatgaggctggggctggtgtgggtcttttggctgcttttcaaggtgtcccccaatgtggccctcaagagccatccccactgcctggccagagccattgttgtcccctacttcctaggccatttctggggcttgggggatgaatgctgtcctgtgctgtaaacactatgcaaatggaagttatcggttgtggtgctgtgcagcgctctgtgggcgactaagtgccactcacgcagcatgttcctggcaaggagcacataccatcaagccacactatcatggtattgttctcacagtcttttggtggttgatggccactgcaaacctggcaccatcagatctcttctgatctcttgccccagtggggcctggttggtagaatgttggcattcggttgatatccaaagcctgttctcccagccgtcctcctgcagctggagccttcaggccgtattctcacgagggaacgtttgccaaggctctgacctcacagaagatgcccagggcccagaagccatcagaattatcagtggagaagcaccttttgactcttcccttccaatgtaatctctgccaacaccatgaggcttaaggtgctctaagtcatgagtgttttggtctcaaatgctgcagttttaataatctgtgactcctgagagcccatggttttttgaccttgtggttctaaaattccttgtctgacccctgtagatcttttccttgccatgtcacctcccttggcctttgatcctggaaaggtggcagagcctccactgagccaggcccagagctccttgcagtgccttcttccttgtttacctgtgggaggaaacactttttttgtcaggggcagcctggttcagagctcagaggtcacactgtatcaaagatctcaaacagcaaagtcagcatttgctgtatagagctgccacccaactctaagcaggagaaactgtacagaaagggctttgctatttttcccttttgggaaaacaatgaagtgttttaagtcctgggtggactgagagatggtttgcctgtccagacttgctctcaagcctcatccagagaaggagctgcagatgagggagcccgtacactccctgccaccactaggttgtaagcctgtagctggctggctgatttcattttggaattcatttgccatccacagccttacactaggcacacactttagagtctggggctccagtggggcccgcctaattttttttccccccaagacagggccttgctctgtctcccaggctggagtgcagtggcatgatcatggcttactgcagccttgatctcccaggctcaagcgatccttctgcctcagcctctctggtagctgagactgcatgcccagctccaaatcaccttgattcatatcagcagtaataatcacttgtgttctgaaagaaagggcaccagaagttctagcaaaattcagttgtgttctgtgagctagcactttttcctctgacccaattttcttacctataaaatggtgataaaaaccgacaggttgttcaaaggcccagatcagctaaagcatgtatataagagcacgttgtaaacttgaaagagacaaaggcacaaatgtggctgttgattaatttgactgcttctcgttgctcgtcacctccatgccaggcactgtgcttgctaattgctttatgggggcattctcttatttattccccagccctgggaaataggagctgtcattatccttctctttctgcacaaggaaaaattaatgccctgagaattgtcataattttcccaaggctgcccagctggtggtgttaagccagaatttgacctcccagagccagtttccattagctgccatgctctgctgcctctaattcacagaatgcactttctaccctgtgtgccatggagacctcctatggaaaaatgatcagccaccttaccttctactgggtacctgctgtgagtctgcctatgccagaaggattaaggaggggaggttacccaagaaacaaagcctacatgccgcttacagcccccgttggatggttgctcagtacaacagtcttgcattcagcaggtgtttgttcatcacctactatgtgtcaggctctatgctaggtactggggatacaggagagaatcaagcgtaaagtctttgttctcaaggaatttgcattctagaaagtagaagatgtaataaatgtactgtgggacatgttaataagtgctataaagaaatataaagggtttgggagcaaaaagagggagtggatctattttagatgagcccaggtaagacctctctgaagagctgtcatgaaggagggagggagcacattcctggcagagaaaacagcacgtgcaaaggccccgagactggagtgtgttcctgaagagcagccaggaggccagcatggctggagaggcaggcataggcagggaaccgagcagcaggtcagagcaggcgagctgacattctgcagcctggacggccatggcaggaagcttttagttggagagatacaggaagcctcctagggttctgagcagaagaggggcatgagctgattcacattctgaaggacctctctagctggccagtgctgaggaggttggagagagaaagggtgaaagcagagagaccagtgcagggctgttaacagggttgcaggcgagagactggggtgctgggctcccctagactaggactccagtgccctcctctcccaagagacaaaggccattgcattgaaggaggtgggaaatgattagattctgaacatatgtaattatttttcagtctttttcaaagatacaaatatttacatagttttaatcatgtaatatatacaatttaatgtcctagtgttttacttaatagtgtatcatgttttccctgttggtatgtagcctggataaatgctcttaattataaaaaattctgtcgaggagtgttccatagtttattgttttcctattatgagaatttaggccaagtgtggtggctcatgcctgtaatcccagcactttgcgaggccgaggtgggcagatcacttgaggtgaggagttcaagaccagcctggccaacatggtgaattatctctactaaaaatacaaaaaaataataataatagccaggcgtggtggcacatgcctgtattcccagctgcttgggaggctgaggcaggagaatggcttgaacctgggaggtggaggttgcagtgagccgagatggtgccactgcattccagcctgggcaacagagcgagactccatctcaaaaaaaaggagacttcatgtgcccccaatttttcactattgttatttgaaaaaatatttttatttgtaagagtttttctttatttaaaatgttcattaataaagttgttggacgggaagcaaaaaaaaaaagttgtttaagataaattcccagaagtgaatttgttagatcaaacacttaaaactttttgttatggaagaattcaaatataaataaaaaattgtgagtaataaaatgaactcacagtttcaacaatgacccacaaaaaaaaaaaaaaaaaaaaaaaaaaaaaaa

SEQ ID NO: 177 - DNA, 4843 bp, Homo sapiens
cggaagtgcgtggccgcccggggccatggcgacactcagcttcgtcttcctgctgctgggggcagtgtcctggcctccggcttctgcctccggccaggagttctggcccggacaatcggcggccgatattctgtcgggggcggcttcccgcagacggtatcttctgtatgacgtcaaccccccggaaggcttcaacctgcgcagggatgtctatatccgaatcgcctctctcctgaagactctgctgaagacggaggagtgggtgcttgtcctgcctccatggggccgcctctatcactggcagagtcctgacatccaccaggtccggattccctggtctgagttttttgatcttccaagtctcaataaaaacatccccgtcatcgagtatgagcagttcatcgcagaatctggtgggccctttattgaccaggtttacgtcctgcaaagttacgcagaggggtggaaagaagggacctgggaagagaaggtggacgagcggccgtgtattgatcagctcctgtactcccaggacaagcacgagtactacagaggatggttttggggttatgaggagaccaggggtctaaacgtctcctgtctgtccgtccagggctcagcctccatcgtggcgcccctgctgctgagaaacacatcagcccggtccgtgatgttagacagagccgagaacctacttcacgaccactatggagggaaagaatactgggatacccgtcgcagcatggtgtttgccaggcacctgcgggaggtgggagacgagttcaggagcagacatctcaactccacggacgacgcagacaggatccccttccaggaggactggatgaagatgaaggtcaagctgggctccgcgctagggggcccctacctgggagtccacctgagaagaaaagatttcatctggggtcacagacaggatgtacccagtctggaaggggccgtgaggaagatccgcagcctcatgaagacccaccggctggacaaggtgtttgtggccacagatgccgtcagaaaggaatatgaagagctaaaaaagctgttacccgagatggtgaggtttgaacccacgtgggaggagctggagctctacaaggacggaggcgttgcgattattgaccagtggatctgcgcacacgccaggtgcctgcccacgtcactgtcggccgagagcgggtcgggtggctttcaaaggttcttctgtcccaagtactcggtgtcagagcagatggtcgcctgtgttcacagtggtcatttccatactgtttgcctcctcgtctgagtctcctgtagcatctggttcagtgtttccctgggctgaagttaattgttcatcttgcccctttagttctcatgcacagaattcctccatagcaggctgttggcatagctggcctcgtctcagaacctcttcttgtgtcgcattttcccatcattcccggtttctgcccctgtctgccccctgccctgagagttgcccgtgccctggacttgggcatgtccttgttgctgtgttgttgagcatccgtgagcgtccccgaggccgggagcgtgggccctcgtgtgatcattctcgtggggctgccatgagcgtccccaaggctgggagcatgggccctcgtgtgatcgttcttgtggggctgccgtgagcgtccccgaggccgggagcgtgggccctcgtgtgatcattctcgtggggctgccgtgagcgtcccagaggccgggagcgtgggccctgcgtgcagtcattcctctggggttgctgtgggaggtacgcctgggcctctgttcctccaaagacctgcctgcccatctgcataggagatgaaggctggggttagggtgaaacggtttgagttaaatggaaaatgaaagtagagggaatgatcttccccgtggttagcactgtgcacacgcgtgcgtctctgtgggttagtctgtctctctcctgcccgaggaatgctgagcgccctgagccggtgcctcttcacacatctgctatttcctgtggtgttctgggcatggtgtgtaagacccacagaggctccgggtgatgctgtctgctgggtgtgggtccctttccctgttaagcagacaggatgcagcgctgacttcttaggtcagggcggaggtgtgcaggagcccagttacgaactcacccctgcttctcaggtgtggccttgggattttgactgcgaccttggcggtgctgtctccgcagcccaggaagcctgctgtggggaggcttcgcactgagctctcagcctcctgccctcagctgcgcgaagcgctcggcccagctcactgaagctgccctgcctccgggccggcgcggcctgctctggcaggcccctgtgtgtggggtggtgagggtctccccaccagtgctgcaccccgcagcagcatacaggcctgtgtggcctgctggccctgtggctctgtgtacagcgctgtgcatgttacatttgctctggaaacatctctggggtttgcttgttcacgaagttcatgaagtgccgctggagagccagagaccagctgcgcaggagccggaggaacgggcaggccgctgacctgaggtctggagaaacccctggagaagggtgtccccaccagcccatacagcgtgtgtgtggagggggccttgacctccgtgatgtctactgtgcctcaggataaggacccgccatgccctggctagacagtgtgtggttagtaggaatctctcattgttcaccatgtgacccccaggaggtattcgacctgcactggcgtgcctggcctgggatttggtgacggagaggagggctcccagggggacatgcggtgggacaggagcgtggcggctgctgactgtggggtgtggatggggctgcagcaccaggcagagcccctcagggcgccgatgtcgagggcacctgagcgaggggtgccagcaagggggcggccggctggtgggtgctcgggggacggccgtgttggttccatgtaactgtggaactcatttcactcagctgctcctctcagttctccctgactctggaacctctgtgacgccagttctccctgactctggaacctctgtgatcctttgcaggttttttattggcacctcagtctcaacattttcttttcggattcatgaggaaagagaaatcctggggttggaccccaagacgacgtacaacaggttctgcggagaccaagagaaggcgtgtgagcaacccacccactggaagatcacctactgaggaggatcctccagggccgctccccggacccgacaggcgcgggtggatgcaggttctgtcgccgtggagtcaccgtctactgccagccgggagctgggcggacaggaccgtccctcgcagggtcccaggcccagaagaggccccacgcctctagagctgggctccgtcctcggcgttgccagccgccatggctgatgaagaggctccgctgctctcgggggtggcggttgttttcaggcagcgtctgtgaacccacagctcggttgccagcagtgcccgcgtggtgacccagaagcaggagtgtttgtcaggctcccgctctggcctttccagccacctttcatgtcttcatattttaagtgcattgaggatagatgcaggcgggtgagctgccctccgtcaggtggacccgggctgacatttccctgggagctggtgcaaggagaagcgtcattttaaatgtctgcagagcgaccaggggcctcatgaatctctccgttgccctccgcgcagcaggaggctgcctgtgtgtttcctcctgggatgcgtgcaaggcagacctggtgctgcaaaggaaagggcctgaggcctcagggagccccgtggagggatgacagttcaggccctactgctggcacgtcagagcactgggaagtttttcagtgacgtctctggggcactcagtggattgtctgtaggaaacttgcagctctgctcctcacaccaggcccggctggccacccaccctcgcccccactggccacccctccctcgccccgactgccccgccccaccctcaccccgactgccccgccctcgcccggctggccgtccctgccctcgccccggctggcaggtgcacatggggcctccaggtctgccattcgctattgagaactagaaatgaggaaggacagttacgctaactccaaaaggctgtctaggatgagctgctttatcagggagctccttgtacccattttacagaaatcatttttaggtctttgtgccaccaccacgaggggcatctgcaaagagggcaacgctagacacagaatccgtggaaggtgcagcagtgcctcaggggtcctcagggtcagggagcccccctcaccctcttggcccgttaccctttgtgactttccaccatggtgtcgtgtgaccctcagtcaggttggtgggggctgagtcctcactgagcagccactttccacatctgctagaggaacagtgacatggacacctgtgacagagagaggacagttaggagggacagacagctcttcctttcggagcctggctagtctaggacatcaccttgctgtgtcttctcaagcttttaaaattgaccctgaacgtgtgacagggtcctatggtgttactcaaagctgtgcagggtaaatgatgacatatttattctttttccatttgttctagaaacagtgcctttttcatcagttgcattttccaggctgagagctgtataaaacattttggactgtgaccatgtaccttcctttttaagaaaaataaactgctttatggaagttggtaaaaaaaaaaaaaaaaaaaaa

SEQ ID NO: 178 - DNA, 2962 bp, Homo sapiens
ggggcggagcgcagccagggctgcgcggcgcgccccggctcccgcccgctcccagccgggccccccagcggtcggcgggacggctcccggctgcagtctgcccgcccgccccgcgcgggggccgagtcgcgaagcgcgcctgcgacccggcgtccgggcgcgctggagaggacgcgaggagccatgaggcgccagcctgcgaaggtggcggcgctgctgctcgggctgctcttggagtgcacagaagccaaaaagcattgctggtatttcgaaggactctatccaacctattatatatgccgctcctacgaggactgctgtggctccaggtgctgtgtgcgggccctctccatacagaggctgtggtacttctggttccttctgatgatgggcgtgcttttctgctgcggagccggcttcttcatccggaggcgcatgtaccccccgccgctgatcgaggagccagccttcaatgtgtcctacaccaggcagcccccaaatcccggcccaggagcccagcagccggggccgccctattacaccgacccaggaggaccggggatgaaccctgtcgggaattccatggcaatggctttccaggtcccacccaactcaccccaggggagtgtggcctgcccgccccctccagcctactgcaacacgcctccgcccccgtacgaacaggtagtgaaggccaagtagtggggtgcccacgtgcaagaggagagacaggagagggcctttccctggcctttctgtcttcgttgatgttcacttccaggaacggtctcgtgggctgctaagggcagttcctctgatatcctcacagcaagcacagctctctttcaggctttccatggagtacaatatatgaactcacactttgtctcctctgttgcttctgtttctgacgcagtctgtgctctcacatggtagtgtggtgacagtccccgagggctgacgtccttacggtggcgtgaccagatctacaggagagagactgagaggaagaaggcagtgctggaggtgcaggtggcatgtagaggggccaggccgagcatcccaggcaagcatccttctgcccgggtattaataggaagccccatgccgggcggctcagccgatgaagcagcagccgactgagctgagcccagcaggtcatctgctccagcctgtcctctcgtcagccttcctcttccagaagctgttggagagacattcaggagagagcaagccccttgtcatgtttctgtctctgttcatatcctaaagatagacttctcctgcaccgccagggaagggtagcacgtgcagctctcaccgcaggatggggcctagaatcaggcttgccttggaggcctgacagtgatctgacatccactaagcaaatttatttaaattcatgggaaatcacttcctgccccaaactgagacattgcattttgtgagctcttggtctgatttggagaaaggactgttacccatttttttggtgtgtttatggaagtgcatgtagagcgtcctgccctttgaaatcagactgggtgtgtgtcttccctggacatcactgcctctccagggcattctcaggcccgggggtctccttccctcaggcagctccagtggtgggttctgaagggtgctttcaaaacggggcacatctggctgggaagtcacatggactcttccagggagagagaccagctgaggcgtctctctctgaggttgtgttgggtctaagcgggtgtgtgctgggctccaaggaggaggagcttgctgggaaaagacaggagaagtactgactcaactgcactgaccatgttgtcataattagaataaagaagaagtggtcggaaatgcacattcctggataggaatcacagctcaccccaggatctcacaggtagtctcctgagtagttgacggctagcggggagctagttccgccgcatagttatagtgttgatgtgtgaacgctgacctgtcctgtgtgctaagagctatgcagcttagctgaggcgcctagattactagatgtgctgtatcacggggaatgaggtgggggtgcttattttttaatgaactaatcagagcctcttgagaaattgttactcattgaactggagcatcaagacatctcatggaagtggatacggagtgatttggtgtccatgcttttcactctgaggacatttaatcggagaacctcctggggaattttgtgggagacacttgggaacaaaacagacaccctgggaatgcagttgcaagcacagatgctgccaccagtgtctctgaccaccctggtgtgactgctgactgccagcgtggtacctcccatgctgcaggcctccatctaaatgagacaacaaagcacaatgttcactgtttacaaccaagacaactgcgtgggtccaaacactcctcttcctccaggtcatttgttttgcatttttaatgtctttattttttgtaatgaaaaagcacactaagctgcccctggaatcgggtgcagctgaataggcacccaaaagtccgtgactaaatttcgtttgtctttttgatagcaaattatgttaagagacagtgatggctagggctcaacaattttgtattcccatgtttgtgtgagacagagtttgttttcccttgaacttggttagaattgtgctactgtgaacgctgatcctgcatatggaagtcccacttcggtgacatttcctggccattcttgtttccattgtgtggatggtgggttgtgcccacttcctggagtgagacagctcctggtgtgtagaattcccggagcgtccgtggttcagagtaaacttgaagcagatctgtgcatgcttttcctctgcaacaattggctcgtttctcttttttgttctcttttgataggatcctgtttcctatgtgtgcaaaataaaaataaatttgggcaaaaaaaaaaaaaaaaaaa

SEQ ID NO: 179 - DNA, 1793 bp, Homo sapiens
cgcgtccgccccgcgagcacagagcctcgcctttgccgatccgccgcccgtccacacccgccgccagctcaccatggatgatgatatcgccgcgctcgtcgtcgacaacggctccggcatgtgcaaggccggcttcgcgggcgacgatgccccccgggccgtcttcccctccatcgtggggcgccccaggcaccagggcgtgatggtgggcatgggtcagaaggattcctatgtgggcgacgaggcccagagcaagagaggcatcctcaccctgaagtaccccatcgagcacggcatcgtcaccaactgggacgacatggagaaaatctggcaccacaccttctacaatgagctgcgtgtggctcccgaggagcaccccgtgctgctgaccgaggcccccctgaaccccaaggccaaccgcgagaagatgacccagatcatgtttgagaccttcaacaccccagccatgtacgttgctatccaggctgtgctatccctgtacgcctctggccgtaccactggcatcgtgatggactccggtgacggggtcacccacactgtgcccatctacgaggggtatgccctcccccatgccatcctgcgtctggacctggctggccgggacctgactgactacctcatgaagatcctcaccgagcgcggctacagcttcaccaccacggccgagcgggaaatcgtgcgtgacattaaggagaagctgtgctacgtcgccctggacttcgagcaagagatggccacggctgcttccagctcctccctggagaagagctacgagctgcctgacggccaggtcatcaccattggcaatgagcggttccgctgccctgaggcactcttccagccttccttcctgggcatggagtcctgtggcatccacgaaactaccttcaactccatcatgaagtgtgacgtggacatccgcaaagacctgtacgccaacacagtgctgtctggcggcaccaccatgtaccctggcattgccgacaggatgcagaaggagatcactgccctggcacccagcacaatgaagatcaagatcattgctcctcctgagcgcaagtactccgtgtggatcggcggctccatcctggcctcgctgtccaccttccagcagatgtggatcagcaagcaggagtatgacgagtccggcccctccatcgtccaccgcaaatgcttctaggcggactatgacttagttgcgttacaccctttcttgacaaaacctaacttgcgcagaaaacaagatgagattggcatggctttatttgttttttttgttttgttttggttttttttttttttttggcttgactcaggatttaaaaactggaacggtgaaggtgacagcagtcggttggagcgagcatcccccaaagttcacaatgtggccgaggactttgattgcacattgttgtttttttaatagtcattccaaatatgagatgcattgttacaggaagtcccttgccatcctaaaagccaccccacttctctctaaggagaatggcccagtcctctcccaagtccacacaggggaggtgatagcattgctttcgtgtaaattatgtaatgcaaaatttttttaatcttcgccttaatacttttttattttgttttattttgaatgatgagccttcgtgcccccccttccccctttttgtcccccaacttgagatgtatgaaggcttttggtctccctgggagtgggtggaggcagccagggcttacctgtacactgacttgagaccagttgaataaaagtgcacacctta

SEQ ID NO: 180 - DNA, 2762 bp, Homo sapiens
gggcccagatagaacaagaaggcagaagaaatgtgaattcctctttctctgctggagctgggatattcttcttctcctgcccttggacatcagagctgcaggctctctggcctttggacccgaggatttataccaagcaggtttctgggttctcaggcctttggccttggactgatagttacaccattggcatatctggttctgaggctcttggtcttggactgagccacactcctggcatcccagcgtctccagcttgcatggcctgtcacgtgattcctgtcagaatcaccatttttggtaaacaaaccaagcccagaacctgataattatggagcattctacactgacagttctttgagacaaatttcctcttggcatttacactgtggctttagctttcaaaccagaggttcctcttacccagcaaaaaatggctttcccgaagatgagattgatgtatatttgccttctggttctgggggctctttgtttgtattttagcatgtacagtctaaatcctttcaaagaacagtcctttgtttacaagaaagacgggaacttccttaagctcccagatacagactgcaggcagacacctcccttcctcgtcctgctggtgacctcatcccacaaacagttggctgagcgcatggccatccggcagacgtgggggaaagagaggatggtgaagggaaagcagctgaagacattcttcctcctggggaccaccagcagtgcagcggaaacgaaagaggtggaccaggagagccagcgacacggggacattatccagaaggatttcctagacgtctattacaatctgaccctgaagaccatgatgggcatagaatgggtccatcgcttttgtcctcaggcggcgtttgtgatgaaaacagactcagacatgttcatcaatgttgactatctgactgaactgcttctgaagaaaaacagaacaaccaggtttttcactggcttcttgaaactcaatgagtttcccatcaggcagccattcagcaagtggtttgtcagtaaatctgaatatccgtgggacaggtacccaccattctgctccggcaccggctacgtgttttctggcgacgtggcgagtcaggtgtacaatgtctccaagagcgtcccatacattaaactggaagacgtgtttgtggggctctgcctcgaaaggctgaacatcagattggaggagctccactcccagccgaccttttttccagggggcttacgcttctccgtatgcctcttcaggaggatcgtggcctgccacttcatcaagcctcggactctcttggactactggcaggctctagagaattcccggggggaagattgtccgcctgtctgaggggagcccagaggcacatccggacaagtttcagataacccgtggggatagtttttgctagattttggaagagggggcgggacagaggatgctgttcttcagtgctgaaatccacgccagaatgtcggtgttcatgaagtcactgattagttcccacttggtgccccaggcaataataggcccgtctcttgggcacgcacactcttcatactaagtgtttgacatacacctggatttttgcatttcaggggtcagtatcctatgacatgatgggtgttaccatcctaattttacaggcaaggacacagcagctgcgagaggtacagaaacttgtcccaaggctcacagccagtaggcataggagcgggaatgaaaatcgagcactgtcagaatctggtgggcagcccctgacttgaaccactcccacgtgctgcctcccttaggaggggacactgatgatgaggtctcggagccggcatccttccatccctgtcgagtcccctccacctcagctcccagtccttgtgctttttggagctaagcctgggatgaccaaattcaccccagctccttcattcacagggctggatgtagctgggattgagtccatgttatcggctcggtactcaacacaacccaagtttcatccgaggaaatgtccccgcagtggatgcagctcacatgctgaggaacacccagctctggacagagttcttataaatgtataaattaggctcagaaaccactgcattctgacctgctgtacagactgcccacactgctgacctgcctagcgagcaggacatcccttctgagccatctgctgctctctcatttcatcaccccaactgtcccttgtttttgatcaatggggaccagccactgccccaggagcactttagggctctcagttcaaactgaaggacagttgaactcagatggggttcatgtgggattctgggagctttctgggaattcagttggagtcaagtcaggatgctctcaaggacccctcgggctcagagccctaaagtgggccctggtgaagcagggtggtcctgcgtccacttcccaagcctgagccaagctcatcttcattgaatgtctcatttggccgaggaacaactgaactttgtggtttgctgtttagccttcagtttgctccgctgcctcctacccagaggtttgtgcgagcctgtgttgcagggttgtataaaaccaaggtacttcgttagttttgcccattcagccatggtcacgtgacatgcaaagtaatcttgctcctaattatagaaatgatttttcttttaattttttactttaccagactttactttgtactcagagaagaggcctcacatggctgtgtcacatataaatgttggactaaactctt

SEQ ID NO: 181 - DNA, 3523 bp, Homo sapiens
atggctgtgcgctctcgccgcccgtggatgagcgtggcattagggctggtgctgggcttcaccgccgcgtcctggctcatcgcccccagggtggcggagctgagcgagaggaagagacgtggctccagcctctgctcctactacggtcgctctgctgctggcccccgcgccggcgctcagcagccgctcccccagccccagtcccgaccacggcaggagcagtcgccgccccccgcgcgccaggatctccaggggccaccgctgcccgaggcagcacccgggatcaccagttttcgaagcagcccctggcagcagccacctccgctgcagcagcggcggcgaggacgcgagcctgagggcgcgacggggcttcccggtgctccagcggccgagggggagcccgaggaggaggacgggggcgcggctgggcagcggagagacggccggccggggagtagccacaacggcagcggggacgggggcgctgccgccccgagcgcccgaccccgggacttcctgtacgtgggggtgatgaccgcgcagaagtacctgggcagccgcgcgctggccgcgcagcggacctgggcgcgtttcatcccgggccgcgtggagttcttttccagccagcagccccccaacgccggccagcccccgccacccctgcctgtcatcgcgctaccgggtgtggacgactcctatcctccccagaaaaagtccttcatgatgatcaagtacatgcacgaccactacctggacaagtatgagtggttcatgcgcgccgacgacgatgtctacatcaaaggtgataaattagaagagtttcttagatcgctaaacagcagtaagcctctctacctgggacagactggcctggggaatattgaagagcttggaaagctgggactggagcctggggaaaacttctgtatgggaggacctggcatgatctttagccgagaagttctcaggaggatggtgccacatattggtgaatgccttagagaaatgtacacgactcatgaggatgtggaagtaggaagatgcgttcgccgttttggtgggactcagtgtgtctggtcttacgagatgcaacaactgttccatgaaaattatgaacacaatcggaagggttacatccaagaccttcacaatagcaaaatccatgcagccataacacttcatcccaacaaaaggcctgcataccaatacaggctgcataattacatgctcagccgcaaaatttctgaacttcgctaccgcaccatccagctccacagggaaagtgccctgatgagcaagctcagtaacacagaagtgagcaaagaggaccagcagctgggagtgataccttctttcaaccacttccagcctcgggagagaaatgaagtgatagaatgggagttcctgacagggaagcttctatactcagcagctgagaaccagccccctcgacagagcctcagtagcattttaagaacagcactggatgataccgtcctacaggtgatggagatgatcaatgagaatgccaagagcagaggacggctcattgacttcaaggaaattcagtatggctaccgcagagttaaccccatgcacggggtggagtacattttggatttactccttttatacaaaagacacaagggaaggaaactgactgtgccagtgagacgtcatgcctatcttcagcagttgttcagcaagcctttcttcagagagaccgaagagctagatgtcaacagtcttgtggagagtattaacagtgaaactcagtcattctcctttatatctaattctttaaagatattatcttcttttcaaggtgccaaagaaatgggagggcacaatgaaaagaaagtacacattctcgttcctctcatcggaaggtatgacattttcttgagattcatggagaactttgaaaacatgtgtcttatcccaaagcagaatgtaaagttggtcattatccttttcagtagggattctggccaagactccagcaagcatattgagctgataaaagggtaccagaacaagtaccccaaagcagaaatgaccctgatcccaatgaagggagagttttccagaggtcttggtcttgaaatggcttctgcccagtttgacaatgacactttgctgctattttgtgatgttgacttgatcttcagagaagattttctccaacgatgtagagacaatacaattcagggacaacaggtgtactatcccatcatctttagccagtatgacccaaaggtaacaaacgggggaaatcctcccactgatgattacttcatattctcaaaaaagactggattttggagagactatggatatggcatcacctgtatttacaaaagtgatcttctaggtgcaggtggatttgatacctcaatacaaggctggggactagaagatgtagatctctacaataaagtcattctatctggcttaaggccattcagaagccaagaagtaggagtggtgcatattttccatccagttcattgtgatcctaacttggaccctaagcagtataagatgtgcttaggatccaaggcaagtactttcgcctcaaccatgcaactggctgaactctggcttgaaaaacatttaggtgtcaggtacaatcgaactctctcctgacagtccaggcaacacattttgccttttttaaggggagtttacctcattgttggttgttgttatttttattgtattattgttattttattattattattgttataattttattttgttgtcctggtcttaaactactcttggttgtcttcctaagggtgtttgttgacctcaagcaagaagagtctgcagttcactgatgtttcagatttctactgaagtcaatatgttattacttttatataactttatttgagattgagttaaatcatagcaatcaaatgacttttgaaacgcattcatcacaagagacagcttagaagaatgttctcttggggcttaaagatgcaatatcgacttttatttggtttctcaaattcaatgtgatacaaatatttactggtgaaaggtaccacaaaagtgctttatgcttcctatggggaagggactctgtaacataaacttgagttttgtaatttatacaaggacttaaatatataaacaataattttcttcatctttagaatttttaaagtaaatgaatacctatgattgtatgtttattttttaaaaaaagttttaaaaattgaggagttttgttccacaagcaaccggtactggctaccctggtcttatgacaattatgagctcctcacaactgtctgctataaatgcgaatgaactttattttctcaaggaaatatgatttaattaaatattcatgtacattttagaagctttatgaaacaatgtccttcatttgctggcaagaagataaaatatgacagaacctgtttatttaaaataaaacacaggtatagcagtattctttttcaaaaacactgaaaaaaaaaaaaaaaaaaaaaaaaaaaaaaaa

SEQ ID NO: 182 - DNA, 2098 bp, Homo sapiens
cgcggcgcggcatactcagcggcagagacggaagaacagcgctcccgaggccgcgggagcctgcagagaggacagccggcctgcgccgggacatgcggccccaggagctccccaggctcgcgttcccgttgctgctgttgctgttgctgctgctgccgccgccgccgtgccctgcccacagcgccacgcgcttcgaccccacctgggagtccctggacgcccgccagctgcccgcgtggtttgaccaggccaagttcggcatcttcatccactggggagtgttttccgtgcccagcttcggtagcgagtggttctggtggtattggcaaaaggaaaagataccgaagtatgtggaatttatgaaagataattaccctcctagtttcaaatatgaagattttggaccactatttacagcaaaattttttaatgccaaccagtgggcagatatttttcaggcctctggtgccaaatacattgtcttaacttccaaacatcatgaaggctttaccttgtgggggtcagaatattcgtggaactggaatgccatagatgaggggcccaagagggacattgtcaaggaacttgaggtagccattaggaacagaactgacctgcgttttggactgtactattccctttttgaatggtttcatccgctcttccttgaggatgaatccagttcattccataagcggcaatttccagtttctaagacattgccagagctctatgagttagtgaacaactatcagcctgaggttctgtggtcggatggtgacggaggagcaccggatcaatactggaacagcacaggcttcttggcctggttatataatgaaagcccagttcggggcacagtagtcaccaatgatcgttggggagctggtagcatctgtaagcatggtggcttctatacctgcagtgatcgttataacccaggacatcttttgccacataaatgggaaaactgcatgacaatagacaaactgtcctggggctataggagggaagctggaatctctgactatcttacaattgaagaattggtgaagcaacttgtagagacagtttcatgtggaggaaatcttttgatgaatattgggcccacactagatggcaccatttctgtagtttttgaggagcgactgaggcaaatggggtcctggctaaaagtcaatggagaagctatttatgaaacccatacctggcgatcccagaatgacactgtcaccccagatgtgtggtacacatccaagcctaaagaaaaattagtctatgccatttttcttaaatggcccacatcaggacagctgttccttggccatcccaaagctattctgggggcaacagaggtgaaactactgggccatggacagccacttaactggatttctttggagcaaaatggcattatggtagaactgccacagctaaccattcatcagatgccgtgtaaatggggctgggctctagccctgactaatgtgatctaaagtgcagcagagtggctgatgctgcaagttatgtctaaggctaggaactatcaggtgtctataattgtagcacatggagaaagcaaatgtaaaactggataagaaaattattttggcagttcagccctttccctttttcccactaaattttttcttaaattacccatgtaaccattttaactctccagtgcactttgccattaaagtctcttcacattgatttgtttccatgtgtgactcagaggtgagaattttttcacattatagtagcaaggaattggtggtattatggaccgaactgaaaattttatgttgaagccatatcccccatgattatatagttatgcatcacttaatatggggatattttctgggaaatgcattgctagtcaatttttttttgtgccaacatcatagagtgtatttacaaaatcctagatggcatagcctactacacacctaatgtgtatggtatagactgttgctcctaggctacagacatatacagcatgttactgaatactgtaggcaatagtaacagtggtatttgtatatcgaaacatatggaaacatagagaaggtacagtaaaaatactgtaaaa

SEQ ID NO: 183 - DNA, 3577 bp, Homo sapiens
gaaaggaaaccggcactgcctgccggctttacatctgttgatctgacctgactggaagcgtccaaagagggacggctgtcagccctgcttgactgagaacccaccagctcatcccagacacctcatagcaacctatttatacaaagggggaaagaaacacctgagcagaatggaatcattatttttttcccaaggagaaaaccggggtaaagggagggaagcaattcaatttgaagtccctgtgaatgggctttcagaaggcaattaaagaaatccactcagagaggacttggggtgaaacttgggtcctgtggttttctgattgtaagtggaagcaggtcttgcacacgctgttggcaaatgtcaggaccaggttaagtgactggcagaaaaacttccaggtggaacaagcaacccaggttctgctgcaagcttgaaggagcctggagcgggagaaagctaacttgaacatgacctgttgcatttggcaagttctagcaacatgctcctaaggaagcgatacaggcacagaccatgcagactccagttcctcctgctgctcctgatgctgggatgcgtcctgatgatggtggcgatgttgcaccctccccaccacaccctgcaccagactgacacagcccaagccagcaagcacagccctgaagccaggtaccgcctggactttggggaatcccaggattgggtactggaagctgaggatgagggtgaagagtacagccctctggagggcctgccaccctttatctcactgcgggaggatcagctgctggtggccgtggccttaccccaggccagaaggaaccagagccagggcaggagaggtgggagctaccgcctcatcaagcagccaaggaggcaggataaggaagccccaaagagggactggggggctgatgaggacggggaggtgtctgaagaagaggagttgaccccgttcagcctggacccacgtggcctccaggaggcactcagtgcccgcatccccctccagagggctctgcccgaggtgcggcacccactgtgtctgcagcagcaccctcaggacagcctgcccacagccagcgtcatcctctgtttccatgatgaggcctggtccactctcctgcggactgtacacagcatcctcgacacagtgcccagggccttcctgaaggagatcatcctcgtggacgacctcagccagcaaggacaactcaagtctgctctcagcgaatatgtggccaggctggagggggtgaagttactcaggagcaacaagaggctgggtgccatcagggcccggatgctgggggccaccagagccaccggggatgtgctcgtcttcatggatgcccactgcgagtgccacccaggctggctggagcccctcctcagcagaatagctggtgacaggagccgagtggtatctccggtgatagatgtgattgactggaagactttccagtattacccctcaaaggacctgcagcgtggggtgttggactggaagctggatttccactgggaacctttgccagagcatgtgaggaaggccctccagtcccccataagccccatcaggagccctgtggtgcccggagaggtggtggccatggacagacattacttccaaaacactggagcgtatgactctcttatgtcgctgcgaggtggtgaaaacctcgaactgtctttcaaggcctggctctgtggtggctctgttgaaatccttccctgctctcgggtaggacacatctaccaaaatcaggattcccattcccccctcgaccaggaggccaccctgaggaacagggttcgcattgctgagacctggctggggtcattcaaagaaaccttctacaagcatagcccagaggccttctccttgagcaaggctgagaagccagactgcatggaacgcttgcagctgcaaaggagactgggttgtcggacattccactggtttctggctaatgtctaccctgagctgtacccatctgaacccaggcccagtttctctggaaagctccacaacactggacttgggctctgtgcagactgccaggcagaaggggacatcctgggctgtcccatggtgttggctccttgcagtgacagccggcagcaacagtacctgcagcacaccagcaggaaggagattcactttggcagcccacagcacctgtgctttgctgtcaggcaggagcaggtgattcttcagaactgcacggaggaaggcctggccatccaccagcagcactgggacttccaggagaatgggatgattgtccacattctttctgggaaatgcatggaagctgtggtgcaagaaaacaataaagatttgtacctgcgtccgtgtgatggaaaagcccgccagcagtggcgttttgaccagatcaatgctgtggatgaacgatgaatgtcaatgtcagaaggaaaagagaattttggccatcaaaatccagctccaagtgaacttaaagagcttatatatttcatgaagctgatccttttgtgtgtgtgctcctggtgttaggagagaaaaaaagctctatgaaagaatataggaagtttctccttttcacaccttatttcattgactgctggctgctttaaaaaaaaaaaaaaggatccattgtaccgttgtcttcatcactgggaaatgattattacatagtacagaagattctttgtttttctccactgagcacttaacaattgctttctctctggcctggacattctctggcagcacctccaggatacataaattcaatggatcaatttatttgtcttcaaatggccttaacttggattgtctgtttggccaaccatgaaaattaaagagtgaagcagatgtaatggcctgacattccaaaaactctgaattgggtttattagcacaaatgttgtgttcatttgttgagccatatctcagaagaaggaaagggagctacagaaaggaggtttaggattgcagagaagatgcaagagcactttggcccaattctccagctcaacccagcagctgaaaagcttcaagagatctaggaaaagacattttcatgttaatgagaatttccaccattgtagagaatttccttcctactgagaatctacctctattccccctgccctagctcttctctaacttggttaaccataaccataaccagattcccttgcaatcgatttctctttagtcgttggtgttagaagtaccagcacaatttgagcattcccattaacaaaggtgttcacagttgagaaactctcctgccgggcgcggtggctcatgcctgtaattccagcactttgggaggcagagttgggaggatcacctgatgtcaggggtttgagaccagcctggtcaacattgcaaaaccttgtctctactaaaaatacaaaaattagctgggcatggtggcgcatacctgtaatcccagctacttgggaggctgaggcaagagaatcgcttgaacccaggaggcagaggttgcagtgagctgagatcatgccattgcactccaacctgggtgacagagtgagactccatctcaaaaaaaaaaaaaaa

SEQ ID NO: 184 - DNA, 2762 bp, Homo sapiens
ccgccccgccccgccttgccccaacccacgatggtctgggagctgcgcccagggcttggcgctggcggccccgcaacagcaccgagcgtttcggtcggcgggcggcggtagcgccccctctcagagccccgctcactcccacctcggctcgctccgagtcggcctgtctgtcgggcccgccctccccgctcactccctccgccctcgtgctcctcccggggtgcttggcacagcctcggattcctccctctcgctgctcgagtcagtttccctatcggcggcagcgggcaaggcggcggcggcggcggcggcagccgcggtggcggcgtggggaacatctcggcagccaccgcgcttctcccgctggagcgggcgtccagcttggctgccctcggtccttccctgccacgtttcgggtcgccctgcaccccccacccaggctcgcttctcttcgaagcgggaagggcgccttgcaggatcctgccgcccctccaaccggatcctgggtctagagctccccagagcgaggcgctcgccaggactcctgccccgccaaccctgaccgccggggggtgcccccgggacgtagcgccgcggagaggaagcggcaaaggggaccatgcggcgcctgactcgtcggctggttctgccagtcttcggggtgctctggatcacggtgctgctgttcttctgggtaaccaagaggaagttggaggtgccgacgggacctgaagtgcagacccctaagccttcggacgctgactgggacgacctgtgggaccagtttgatgagcggcggtatctgaatgccaaaaagtggcgcgttggtgacgacccctataagctgtatgctttcaaccagcgggagagtgagcggatctccagcaatcgggccatcccggacactcgccatctgagatgcacactgctggtgtattgcacggaccttccacccactagcatcatcatcaccttccacaacgaggcccgctccacgctgctcaggaccatccgcagtgtattaaaccgcacccctacgcatctgatccgggaaatcatattagtggatgacttcagcaatgaccctgatgactgtaaacagctcatcaagttgcccaaggtgaaatgcttgcgcaataatgaacggcaaggtctggtccggtcccggattcggggcgctgacatcgcccagggcaccactctgactttcctcgacagccactgtgaggtgaacagggactggctccagcctctgttgcacagggtcaaagaggactacacgcgggtggtgtgccctgtgatcgatatcattaacctggacaccttcacctacatcgagtctgcctcggagctcagaggggggtttgactggagcctccacttccagtgggagcagctctccccagagcagaaggctcggcgcctggaccccacggagcccatcaggactcctatcatagctggagggctcttcgtgatcgacaaagcttggtttgattacctggggaaatatgatatggacatggacatctggggtggggagaactttgaaatctccttccgagtgtggatgtgcgggggcagcctagagatcgtcccctgcagccgagtggggcacgtcttccggaagaagcacccctacgttttccctgatggaaatgccaacacgtatataaagaacaccaagcggacagctgaagtgtggatggatgaatacaagcaatactattacgctgcccggccattcgccctggagaggcccttcgggaatgttgagagcagattggacctgaggaagaatctgcgctgccagagcttcaagtggtacctggagaatatctaccctgaactcagcatccccaaggagtcctccatccagaagggcaatatccgacagagacagaagtgcctggaatctcaaaggcagaacaaccaagaaaccccaaacctaaagttgagcccctgtgccaaggtcaaaggcgaagatgcaaagtcccaggtatgggccttcacatacacccagcagatcctccaggaggagctgtgcctgtcagtcatcaccttgttccctggcgccccagtggttcttgtcctttgcaagaatggagatgaccgacagcaatggaccaaaactggttcccacatcgagcacatagcatcccacctctgcctcgatacagatatgttcggtgatggcaccgagaacggcaaggaaatcgtcgtcaacccatgtgagtcctcactcatgagccagcactgggacatggtgagctcttgaggacccctgccagaagcagcaagggccatggggtggtgcttccctggaccagaacagactggaaactgggcagcaagcagcctgcaaccacctcagacatcctggactgggaggtggaggcagagccccccaggacaggagcaactgtctcagggaggacagaggaaaacatcacaagccaatggggctcaaagacaaatcccacatgttctcaaggccgttaagttccagtcctggccagtcattccctgattggtatctggagacagaaacctaatgggaagtgtttattgttccttttcctacaaaggaagcagtctctggaggccagaaagaaaagccttctttttcactaggccaggactacattgagagatgaagaatggaggttgtttccaaaagaaataaagagaaacttagaagttgtctctggaaaaaaaaaaaaaaaaaaaaaaaaaaaaaaaaaaaaaaaaaaaaaaaaaaa

SEQ ID NO: 185 - DNA, 1310 bp, Homo sapiens
aaattgagcccgcagcctcccgcttcgctctctgctcctcctgttcgacagtcagccgcatcttcttttgcgtcgccagccgagccacatcgctcagacaccatggggaaggtgaaggtcggagtcaacggatttggtcgtattgggcgcctggtcaccagggctgcttttaactctggtaaagtggatattgttgccatcaatgaccccttcattgacctcaactacatggtttacatgttccaatatgattccacccatggcaaattccatggcaccgtcaaggctgagaacgggaagcttgtcatcaatggaaatcccatcaccatcttccaggagcgagatccctccaaaatcaagtggggcgatgctggcgctgagtacgtcgtggagtccactggcgtcttcaccaccatggagaaggctggggctcatttgcaggggggagccaaaagggtcatcatctctgccccctctgctgatgcccccatgttcgtcatgggtgtgaaccatgagaagtatgacaacagcctcaagatcatcagcaatgcctcctgcaccaccaactgcttagcacccctggccaaggtcatccatgacaactttggtatcgtggaaggactcatgaccacagtccatgccatcactgccacccagaagactgtggatggcccctccgggaaactgtggcgtgatggccgcggggctctccagaacatcatccctgcctctactggcgctgccaaggctgtgggcaaggtcatccctgagctgaacgggaagctcactggcatggccttccgtgtccccactgccaacgtgtcagtggtggacctgacctgccgtctagaaaaacctgccaaatatgatgacatcaagaaggtggtgaagcaggcgtcggagggccccctcaagggcatcctgggctacactgagcaccaggtggtctcctctgacttcaacagcgacacccactcctccacctttgacgctggggctggcattgccctcaacgaccactttgtcaagctcatttcctggtatgacaacgaatttggctacagcaacagggtggtggacctcatggcccacatggcctccaaggagtaagacccctggaccaccagccccagcaagagcacaagaggaagagagagaccctcactgctggggagtccctgccacactcagtcccccaccacactgaatctcccctcctcacagttgccatgtagaccccttgaagaggggaggggcctagggagccgcaccttgtcatgtaccatcaataaagtaccctgtgctcaacc

SEQ ID NO: 186 - DNA, 2484 bp, Homo sapiens
catcgaacaaacaactgagatcctgttgtgcctatcacctgttgaagttgccagtcttaaggaaggaatcaatttctttcgcaataagagcactggcaaagactacgtcttgtacaagaataagagccgactgagggcatgcaagaatatgtgcaagcaccaaggaggcctgttcataaaagatatcgaggatttagccggaagttgttgaaatggatgaaaacaacggacttttgcttttagaactgaatcctcctaacccttgggacttacagcccagatctcctgaagagttggcttttggagaagtacagataacatatctcactcatgcctgcatggacctcaagttaggagacaagagaatggtgtttgacccttggttaatcggtcctgcttttgcccgtggatggtggttgctccatgagcctccatctgattggctggagaggctgtgccaggcagacctcatttacatcagtcatctgcactcagaccacctgagttaccccacactgaaaaagcttgctgggagaagaccagatattcccatttatgttggaaacacagaaaggcctgtattttggaatctgaatcagagcggtgtccagttgactaatatcaatgtcgtgccatttggaatatggcagcaggtggacaaaaatcttcgattcatgatcttgatggacggtgttcatcctgagatggacacttgcattattgtggagtacaaaggtcataaaatactcaatatagtagactgcaccagacccaatgggggaaggctgcctatgaaggttgctctaatgatgagtgattttgctggaggagcatcaggctttccaatgactttcagtggtggaaaatttacggaggaatggaaagcccaattcattaaaacagaaaggaagaagctcctgaactacaaggctcggctggtgaagaacctgcaaccccgaatttattgtccctttgctgggtattttgtggaatctcacccatcagacaagtacatcaaggaaacaaacaccaaaaatgacccaaatgaactcaacaatcttatcaagaaaaactctgatgtgataacatggacccctcgaccgggagccacccttgatctgggaagaatgctgaaggatcgaacagacagcaagggcatcatagagcctccagaggggacaaaaatttacaaggattcctgggattttgaaccttatttggaaatcttgaatgctgctctaggagatgaaatatttcttcactcatcctggataaaagaatacttcacttgggctggatttaaagattacaaccttgtggtcaggatgattgagacagatgaggacttcaatccttttcctggaggatatgactatttggttgactttttagatttatccttcccaaaagaaagaccacaacgagaacatccctatgaggaaatccatagccgggtggatgtcatcagacacgtggtgaagaatggtctactctgggatgagttgtatataggattccaaacacggctccagcgggatcctgacatataccatcacctgttttggaatcattttcaaataaaactccccctcacaccacccaactggaagtcattcctgatgtgctgtgagcagaatgggcctgtgattttgcaagaatgcaaaaccacatgaaaatttcaagaattcactgatctgatgcaaaataaaaatttatcattacatcttgaacccaggaagcttacagcaaagagactatgctttatgacgtcagcaatagataattccacgttgcctttgtgatttgtatatatagcttacatttgtggatcactacatagccagattcaaaaatattttacttgttccatccacagttctctacagaaagaaccaatgaacccaataggaacaaattctctgtggaaaacaaagcatagctgtagtagatacgaatccaatcacagaggaaacaggaagagaaaaacatccaagactacagtgaaaactggaaatggtctgttttcgtgatattcgtatgattaagatgcaaattttttcttaggaaaatgtgattgttaactagcattctgttttacatgttgacatttctaacacacacaccactgatttgaacttcaaaatttattttctgattatatatgctaggtctgattctgaagatacaagaattcaatggtggaatttgtctcctgaaatttctagattcataattagaagtgtttattaccaacttctcacttagattaacatcagtgatgtttgattattctggttaaccgctcacatgcataacaataatgctagaaattcaggaattataattttgtgatttatactgtgtggtaaattattcagttctcactgcaaataaatataatgtatatcaatgtaatgtaggtcagaatgtctatggtgagcaaataaaagattattttaaaatatgaaaaaaaaaaaaaaaaaa

SEQ ID NO: 187 - DNA, 2836 bp, Homo sapiens
ccagctcctctgctaccatgaatagggcccctctgaagcggtccaggatcctgcacatggcgctgaccggggcctcagacccctctgcagaggcagaggccaacggggagaagccctttctgctgcgggcattgcagatcgcgctggtggtctccctctactcggtcacctccatctccatggtgttccttaataagtacctgctggacagcccctccctgcggctggacacccccatcttcgtcaccttctaccagtgcctggtgaccacgctgctgtgcaaaggcctcagcgctctggccgcctgctgccctggtgccgtggacttccccagcttgcgcctggacctcagggtggcccgcagcgtcctgcccctgtcggtggtcttcatcggcatgatcaccttcaataacctctgcctcaagtacgtcggtgtggccttctacaatgtgggccgctcactcaccaccgtcttcaacgtgctgctctcctacctgctgctcaagcagaccacctccttctatgccctgctcacctgcggtatcatcatcgggggcttctggcttggtgtggaccaggagggggcagaaggcaccctgtcgtggctgggcaccgtcttcggcgtgctggctagcctctgtgtctcgctcaacgccatctacaccacgaaggtgctcccggcggtggacggcagcatctggcgcctgactttctacaacaacgtcaacgcctgcatcctcttcctgcccctgctcctgctgctcggggagcttcaggccctgcgtgactttgcccagctgggcagtgcccacttctgggggatgatgacgctgggcggcctgtttggctttgccatcggctacgtgacaggactgcagatcaagttcaccagtccgctgacccacaatgtgtcgggcacggccaaggcctgtgcccagacagtgctggccgtgctctactacgaggagaccaagagcttcctctggtggacgagcaacatgatggtgctgggcggctcctccgcctacacctgggtcaggggctgggagatgaagaagactccggaggagcccagccccaaagacagcgagaagagcgccatgggggtgtgagcaccacaggcaccctggatggcccggccccggggcccgtacacaggcggggccagcacagtagtgaaggcggtctcctggaccccagaagcgtgctgtggtgtggactgggtgctacttatagacccaatcagaatacggtggttgagaaggaaccagtgtttacaagtaatatcagaaagttgaaggaaccagtgtttacaagtaataccagaaagttgccaaacccttctctatcctctcgtatttctgagtttttgtccttcccgagggagcaccctagtgagagttgaaccccttccttctgcctccagggcctgtctgcctccacatcactctgaggacagggacaggcaacaaccttgaagggacagcaatggcaaagccacaaaggcttcactgtactcaggggagatggccctaccacagccacctggagagggttgggaagccttccgtctgcggtgggcaggcagcctcaccctgggcccacagaccggccttcctttggaggaaagtgtggcctggactgagggaggaaatgagcgagttccctctgacaccagcagatccccaggggctgctgggcagtggcctgggaatggggtggattgtgagaaagtgctcaccatctatacaccctgtatgtccagcttttgaacacaagggaaccatgcttctcttagaggttaagcagggtcattaacatcctcccccagtccctaacatcacattgtcctgcgtggctcctctggccctgagtggcacctgtccctctggtctcccagcacctggcccaggtaacagccttctgaaagcagagccaaggagctgcttctctcttctcccagttctacctccccagaagccttcctccccaggtggggctgatggagcaagggtccagactaggagccttccaccccagctgtgtctggcgcccctagatctctgcaagggaggtgttacagctggttctgagccgcttgccttgtgatggtaagacaccaacctttacattcttccctgaggttgtggctgacagagcctgcttggccccactgttagtccagcgagctcctatatcaaaatgccgtaggccgggtggcttacaaacaacagaaacgtattgctcacagtcctggggggctgggacgcccaagatcaagaggccagcagattcggactccgctgagggctgtttcccgatccatagatggtgccttctcgctgtatcctcaatggtagaagcacaaacaagcaagctccttcctgcctcttttataaggactccaaccctgttcatgagggttccgcccccatgacccaatcagctccaaaggccccacctcctaatactgtcaccttgggggtgagaattccaatgtgaatttgcagggggagtgggggacacacacaaatttcggggccataccacccttcaccacaccctcctgcgctcagggtggcttgcagtccctggcccttctggtgggcatttggtatgtcctttctcttggggtgatttctgatgtttttactctatatagtgaaaagctagggagagcgggtcttctcccccctccctctccagtcccctcacaatcccagatgggttctaatgcagctgctggggcctgatgccctgagttgtttgtgattcaataaagaatccataagaaaaaaaaaaaaaaaaaaaaaaaaaaaaaaaaaaaaaaaaaaaa

SEQ ID NO: 188 - DNA, 3319 bp, Homo sapiens
gcttccggccgcggccctggcgcgtggtctgcgcgcgcccggccgtgcgtgcggatgcggggaggctgcgtgtgtgcgcagggagagaacgccggccaccttcccgcttccgagctgggtgcgcgccgagcacaggagattgcctgcgtttaggaggtggctgcgttgtgggaaaagctatcaaggaagaaattgccaaaccatgtctttttttctgttttcagagtagttcacaacagatctgagtgttttaattaagcatggaatacagaaaacaacaaaaaacttaagctttaatttcatctggaattccacagttttcttagctccctggacccggttgacctgttggctcttcccgctggctgctctatcacgtggtgctctccgactactcaccccgagtgtaaagaaccttcggctcgcgtgcttctgagctgctgtggatggcctcggctctctggactgtccttccgagtaggatgtcactgagatccctcaaatggagcctcctgctgctgtcactcctgagtttctttgtgatgtggtacctcagccttccccactacaatgtgatagaacgcgtgaactggatgtacttctatgagtatgagccgatttacagacaagactttcacttcacacttcgagagcattcaaactgctctcatcaaaatccatttctggtcattctggtgacctcccacccttcagatgtgaaagccaggcaggccattagagttacttggggtgaaaaaaagtcttggtggggatatgaggttcttacatttttcttattaggccaagaggctgaaaaggaagacaaaatgttggcattgtccttagaggatgaacaccttctttatggtgacataatccgacaagattttttagacacatataataacctgaccttgaaaaccattatggcattcaggtgggtaactgagttttgccccaatgccaagtacgtaatgaagacagacactgatgttttcatcaatactggcaatttagtgaagtatcttttaaacctaaaccactcagagaagtttttcacaggttatcctctaattgataattattcctatagaggattttaccaaaaaacccatatttcttaccaggagtatcctttcaaggtgttccctccatactgcagtgggttgggttatataatgtccagagatttggtgccaaggatctatgaaatgatgggtcacgtaaaacccatcaagtttgaagatgtttatgtcgggatctgtttgaatttattaaaagtgaacattcatattccagaagacacaaatcttttctttctatatagaatccatttggatgtctgtcaactgagacgtgtgattgcagcccatggcttttcttccaaggagatcatcactttttggcaggtcatgctaaggaacaccacatgccattattaacttcacattctacaaaaagcctagaaggacaggatactttgtggaaagtgttaaataaagtaggtactgtggaaaattcatggggaggtcagtgtgctggcttacactgaactgaaactcatgaaaaacccagactggagactggagggttacacttgtgatttattagtcaggcccttcaaagatgatatgtggaggaattaaatataaaggaattggaggtttttgctaaagaaattaataggaccaaacaatttggacatgtcattctgtagactagaatttcttaaaagggtgttactgagttataagctcactaggctgtaaaaacaaaacaatgtagagttttatttattgaacaatgtagtcacttgaaggttttgtgtatatcttatgtggattaccaatttaaaaatatatgtagttctgtgtcaaaaaacttcttcactgaagttatactgaacaaaattttacctgtttttggtcatttataaagtacttcaagatgttgcagtatttcacagttattattatttaaaattacttcaactttgtgtttttaaatgttttgacgatttcaatacaagataaaaaggatagtgaatcattctttacatgcaaacattttccagttacttaactgatcagtttattattgatacatcactccattaatgtaaagtcataggtcattattgcatatcagtaatctcttggactttgttaaatattttactgtggtaatatagagaagaattaaagcaagaaaatctgaagtattgtcttgtttttaaaaaatacagttcctagtgtttttagaagtcacttaatttgtctcatttttccacctggaaattaggaataatgtagaatgcaaggcagtaatttccttttggaaaggactctgaaggcagaaaagaagggagagaacctcatgggcagaatattataaaaagagtgtcatattccagcatttgaattggaaagagaagagtgaagatccaagttgcattattaatctgccctgtgttttttccttttaacaatcagtttgagctgctgctgttatgagtttctcatcaagatgaaagccctaatatgtaaagtcaaatccgatttaaattttgtgcttttatagaaagaaatttcttcatagacgtggtgatatatcatttgttggacctgctaatagtaggtcaaaggggagcactccttgccccctgttcctgggtttatgcagttttctttttagagtttatatagggcaagtggttctttttctctgaattacaggatggaaaaaggtcatatcctttgtcaggaaatataaacttgaaagtatgtagtcagctcttgtaatactcatatttatgattgtcctatatgaaaaacaacttcagttaaaactataatgtgtgattctgtataacaaggtgatgtctgtttcccagggctcagacctaatccagttataataaaatcaattaaatgaaatattctatagaatcgatctatgcccttgttaatctccatccatataggagtcacgttctttaagacagatggtggtagttatttttgtggcatggttagatttgactggttttgcagaagattacagttatgtactgcataatgacatatacaatagtggtcccataaaattataatggagcagaaaatctattgcctcatgatgttttagccgttttaatgtcatagcctagtgcattactcacgtgtctgtggagatgctggtgtaaacaaacctactacactgccagttgtataaaagtacagcacattcagttatgtacagtatgtaatactgataatgacaataaatgacaccggtttgtgtatttactttttataaa

SEQ ID NO: 189 - DNA, 4620 bp, Homo sapiens
ccggaggatgtgcagctgcggcggcggcgccggctacgaagaggacggggacaggcgccgtgcgaaccgagcccagccagccggaggacgcgggcagggcgggacgggagcccggactcgtctgccgccgccgtcgtcgccgtcgtgccggccccgcgtccccgcgcgcgagcgggaggagccgccgccacctcgcgcccgagccgccgctagcgcgcgccgggcatggtcccctcttaaaggcgcaggccgcggcggcgggggcgggcgtgcggaacaaagcgccggcgcggggcctgcgggcggctcgggggccgcgatgggcgcggcgggcccgcggcggcggcggcgctgcccgggccgggcctcgcggcgctagggcgggctggcctccgcgggcgggggcagcgggctgagggcgcgcggagcctgcggcggcggcggcggcggcggcggcggcccggcgggcggagcggcgcgggcatggccgcgcgcggccggcgcgcctggctcagcgtgctgctcgggctcgtcctgggcttcgtgctggcctcgcggctcgtcctgccccgggcttccgagctgaagcgagcgggcccacggcgccgcgccagccccgagggctgccggtccgggcaggcggcggcttcccaggccggcggggcgcgcggcgatgcgcgcggggcgcagctctggccgcccggctcggacccagatggcggcccgcgcgacaggaactttctcttcgtgggagtcatgaccgcccagaaatacctgcagactcgggccgtggccgcctacagaacatggtccaagacaattcctgggaaagttcagttcttctcaagtgagggttctgacacatctgtaccaattccagtagtgccactacggggtgtggacgactcctacccgccccagaagaagtccttcatgatgctcaagtacatgcacgaccactacttggacaagtatgaatggtttatgagagcagatgatgacgtgtacatcaaaggagaccgtctggagaacttcctgaggagtttgaacagcagcgagcccctctttcttgggcagacaggcctgggcaccacggaagaaatgggaaaactggccctggagcctggtgagaacttctgcatgggggggcctggcgtgatcatgagccgggaggtgcttcggagaatggtgccgcacattggcaagtgtctccgggagatgtacaccacccatgaggacgtggaggtgggaaggtgtgtccggaggtttgcaggggtgcagtgtgtctggtcttatgagatgcagcagcttttttatgagaattacgagcagaacaaaaaggggtacattagagatctccataacagtaaaattcaccaagctatcacattacaccccaacaaaaacccaccctaccagtacaggctccacagctacatgctgagccgcaagatatccgagctccgccatcgcacaatacagctgcaccgcgaaattgtcctgatgagcaaatacagcaacacagaaattcataaagaggacctccagctgggaatccctccctccttcatgaggtttcagccccgccagcgagaggagattctggaatgggagtttctgactggaaaatacttgtattcggcagttgacggccagccccctcgaagaggaatggactccgcccagagggaagccttggacgacattgtcatgcaggtcatggagatgatcaatgccaacgccaagaccagagggcgcatcattgacttcaaagagatccagtacggctaccgccgggtgaaccccatgtatggggctgagtacatcctggacctgctgcttctgtacaaaaagcacaaagggaagaaaatgacggtccctgtgaggaggcacgcgtatttacagcagactttcagcaaaatccagtttgtggagcatgaggagctggatgcacaagagttggccaagagaatcaatcaggaatctggatccttgtcctttctctcaaactccctgaagaagctcgtcccctttcagctccctgggtcgaagagtgagcacaaagaacccaaagataaaaagataaacatactgattcctttgtctgggcgtttcgacatgtttgtgagatttatgggaaactttgagaagacgtgtcttatccccaatcagaacgtcaagctcgtggttctgcttttcaattctgactccaaccctgacaaggccaaacaagttgaactgatgagagattaccgcattaagtaccctaaagccgacatgcagattttgcctgtgtctggagagttttcaagagccctggccctggaagtaggatcctcccagtttaacaatgaatctttgctcttcttctgcgacgtcgacctcgtgtttactacagaattccttcagcgatgtcgagcaaatacagttctgggccaacaaatatattttccaatcatcttcagccagtatgacccaaagattgtttatagtgggaaagttcccagtgacaaccattttgcctttactcagaaaactggcttctggagaaactatgggtttggcatcacgtgtatttataagggagatcttgtccgagtgggtggctttgatgtttccatccaaggctgggggctggaggatgtggaccttttcaacaaggttgtccaggcaggtttgaagacgtttaggagccaggaagtaggagtagtccacgtccaccatcctgtcttttgtgatcccaatcttgaccccaaacagtacaaaatgtgcttggggtccaaagcatcgacctatgggtccacacagcagctggctgagatgtggctggaaaaaaatgatccaagttacagtaaaagcagcaataataatggctcagtgaggacagcctaatgtccagctttgctggaaaagacgtttttaattatctaatttatttttcaaaaattttttgtatgatcagtttttgaagtccgtatacaaggatatattttacaagtggttttcttacataggactcctttaagattgagctttctgaacaagaaggtgatcagtgtttgcctttgaacacatcttcttgctgaacattatgtagcagacctgcttaactttgacttgaaatgtacctgatgaacaaaacttttttaaaaaaatgttttcttttgagaccctttgctccagtcctatggcagaaaacgtgaacattcctgcaaagtattattgtaacaaaacactgtaactctggtaaatgttctgttgtgattgttaacattccacagattctaccttttgtgttttgttttttttttttacaattgttttaaagccatttcatgttccagttgtaagataaggaaatgtgataatagctgtttcatcattgtcttcaggagagctttccagagttgatcatttcccctcatggtactctgctcagcatggccacgtaggttttttgtttgttttgttttgttctttttttgagacggagtctcactctgttacccaggctggaatgcagtggcgcaatcttggctcactttaacctccacttccctggttcaagcaattcccctgcctttgcctcccgagtagctgggattacaggcacacaccaccacgcccagctagtttttttgtatttttagtagagacggggtttcaccatgcaagcccagctggccacgtaggttttaaagcaaggggcgtgaagaaggcacagtgaggtatgtggctgttctcgtggtagttcattcggcctaaatagacctggcattaaatttcaagaaggatttggcattttctcttcttgacccttctctttaaagggtaaaatattaatgtttagaatgacaaagatgaattattacaataaatctgatgtacacagactgaaacacacacacatacaccctaatcaaaacgttggggaaaaatgtatttggttttgttcctttcatcctgtctgtgttatgtgggtggagatggttttcattctttcattactgttttgttttatcctttgtatctgaaatacctttaatttatttaatatctgttgttcagagctctgccatttcttgagtacctgttagttagtattatttatgtgtatcgggagtgtgtttagtctgttttatttgcagtaaaccgatctccaaagatttccttttggaaacgctttttcccctccttaatttttatattccttactgttttactaaatattaagtgttctttgacaattttggtgctcatgtgttttggggacaaaagtgaaatgaatctgtcattataccagaaagttaaattctcagatcaaatgtgccttaataaatttgttttcatttagatttcaaacagtgatagacttgccattttaatacacgtcattggagggctgcgtatttgtaaatagcctgatgctcatttggaaaaataaaccagtgaacaatatttttctattgtacttttcgaaccattttgtctcattattcctgttttagctgaagaattgtattacatttggagagtaaaaaacttaaacacgaaaaaaaaaaaaaaaaaaaaaaaaaaaaaaaaaaaaaaaaaaaaaaaaaaaaaaaaaaaaaaaaaaaa

SEQ ID NO: 190 - DNA, 2546 bp, Homo sapiens
gacggcaaatggcggacttcgacacctacgacgatcgggcctacagcagcttcggcggcggcagagggtcccgcggcagtgctggtggccatggttcccgtagccagaaggagttgcccacagagcccccctacacagcatacgtaggaaatctacctttcaatacggttcagggcgacatagatgctatctttaaggatctcagcataaggagtgtacggctagtcagagacaaagacacagataaatttaaaggattctgctatgtagaattcgatgaagtggattcccttaaggaagccttgacatacgatggtgcactgttgggcgatcggtcacttcgtgtggacattgcagaaggcagaaaacaagataaaggtggctttggattcagaaaaggtggaccagatgacagaggaatgggtagctctcgagaatctagaggtggatgggattcccgggatgacttcaattctggcttcagggatgacttcttagggggcaggggaggtagtcgcccaggcgaccggcgaacaggcccccccatgggcagccgcttcagagatggccctcccctccgtggatccaacatggatttcagagaacccacagaagaggaaagagcacagagaccacgactccagcttaaacctcgaacagtcgcgacgcccctcaatcaagtagccaatcccaactctgctatcttcgggggtgccaggcctagagaggaagtcgttcaaaaggagcaagaatgagcctgcggttgggagggaatggggcgtggggggttagagcaggaccacagcctggtgagtccccgggcagccgtcctgcagccgccactcctgcgcctgccattggcctcctcacagcggaaacacagcttgtgagtgcatgtcagctgttaacaagtggtttttagtacattctgggctttgctgtatctatctagtgcctgtttgtgcgtttttttctttcttccgctgcttccccattttccttctgtcctttttctcctgctccttgttttcccagcagcacatggggttcctcggaggagcagaggtggccgccgtgggggggcgtttgggctgcggtgctgcgtcatttttcctttgctttctctttactttagacactggcccaactccaggcgtttcctttcattccctcagtgcttctcttctgacctgcatgttgagttctgtattgctggggcttccaacaaaaaccagagtcactgacagagggaacagcagagaccttgttggtattcagctgtgatggatatagagaatcagaggcaccttgttttcacaactaggataaaaatatctgcagggtcctttccattcctatttagagggagtcctggctccatgaccccctcccgagtggactgtccaagcagataggctcacacgagaaacagtgaggctgaaagggggggctatggaagagcggtagggagtccacggagaagatgcagtgaatgcttgcatgcattcacacgtgtgtgtgtcccagctagttcactcctttcgccgtgcgtggtggaggctggcctctctggctgggtgcagtgaatggccagcgggtttcttttctgctgggccaaggcgctttgggggtggagggggtggtgctggtgctgcactgggctgactgcggcgctgacgcagcgtttccccccatccctgttgcctgtgtgttgtgtggatctgttcctagtataggcaacataatgagatactgtgcttcccacctccccttcagttcagagccaaaatgggtctagaatctggcactttactcatttcctttgataaattgtactatgcagagctgtcaggaaccttcagatagcagtagaggactgcagctgtctaggtctgcggccacatcttggggacacactggactgttcccatgtgcagggttcagcagttatgtgggagtgctaggggttaggcttttgagcttgaacgcctgcgtgtgaacagatgaaaaatccttcagtacccaagtcccagtctgtcctatggggagcagtttgggggcggccggcagcaggagcctgggaaagaggccctcgccaggtgatggcagggccagggtggcctggggcacccagcggaatgtgcttagtatttggtcaccagccgtcatcctgggcttttcctactgtgtcttgttacaaggcctcagcaatccacagaactctctctccttccttccacctgtcagcttctctgcttctgagataagaaccatttgtgtaacaccaacacttaacttcagaaagacatgcattatgtggtgtaatcaaacccgatgctttcagatgacctacttacatcttcaatgtggataagataaagaacaaaacacatgcatctaaactgctgggcaatccagttgacttttaaatgtaagaatggaattccaaacacttaacacattcagctatatgacagaaagtaaatctatggatatggtattttgtgaatgatcttttaaataaaagaaaaccttacgtaatattt

SEQ ID NO: 191 - DNA, 2956 bp, Homo sapiens
cgaggcgcggctccggggattcggctcgggccgctggctctgctctgcggggagggagcgggcccgcccgcggggcccgagccctccggatccgccccctccccggtcccgccccctcggagactcctctggctgctctgggggttcgccggggccggggacccgcggtccgggcgccatgcgggcatcgctgctgctgtcggtgctgcggcccgcagggcccgtggccgtgggcatctccctgggcttcaccctgagcctgctcagcgtcacctgggtggaggagccgtgcggcccaggcccgccccaacctggagactctgagctgccgccgcgcggcaacaccaacgcggcgcgccggcccaactcggtgcagcccggagcggagcgcgagaagcccggggccggcgaaggcgccggggagaattgggagccgcgcgtcttgccctaccaccctgcacagcccggccaggccgccaaaaaggccgtcaggacccgctacatcagcacggagctgggcatcaggcagaggctgctggtggcggtgctgacctctcagaccacgctgcccacgctgggcgtggccgtgaaccgcacgctggggcaccggctggagcgtgtggtgttcctgacgggcgcacggggccgccgggccccacctggcatggcagtggtgacgctgggcgaggagcgacccattggacacctgcacctggcgctgcgccacctgctggagcagcacggcgacgactttgactggttcttcctggtgcctgacaccacctacaccgaggcgcacggcctggcacgcctaactggccacctcagtctggcctccgccgcccacctgtacctgggccggccccaggacttcatcggcggagagcccacccccggccgctactgccacggaggctttggggtgctgctgtcgcgcatgctgctgcaacaactgcgcccccacctggaaggctgccgcaacgacatcgtcagtgcgcgccctgacgagtggctgggtcgctgcattctcgatgccaccggggtgggctgcactggtgaccacgagggggtgcactatagccatctggagctgagccctggggagccagtgcaggagggggaccctcatttccgaagtgccctgacagcccaccctgtgcgtgaccctgtgcacatgtaccagctgcacaaagctttcgcccgagctgaactggaacgcacgtaccaggagatccaggagttacagtgggagatccagaataccagccatctggccgttgatggggaccgggcagctgcttggcccgtgggtattccagcaccatcccgcccggcctcccgctttgaggtgctgcgctgggactacttcacggagcagcacgctttctcctgcgccgatggctcaccccgctgcccactgcgtggggctgaccgggctgatgtggccgatgttctggggacagctctagaggagctgaaccgccgctaccacccggccttgcggctccagaagcagcagctggtgaatggctaccgacgctttgatccggcccggggtatggaatacacgctggacttgcagctggaggcactgaccccccagggaggccgccggcccctcactcgccgagtgcagctgctccggccgctgagccgcgtggagatcttgcctgtgccctatgtcactgaggcctcacgtctcactgtgctgctgcctctagctgcggctgagcgtgacctggcccctggcttcttggaggcctttgccactgcagcactggagcctggtgatgctgcggcagccctgaccctgctgctactgtatgagccgcgccaggcccagcgcgtggcccatgcagatgtcttcgcacctgtcaaggcccacgtggcagagctggagcggcgtttccccggtgcccgggtgccatggctcagtgtgcagacagccgcaccctcaccactgcgcctcatggatctactctccaagaagcacccgctggacacactgttcctgctggccgggccagacacggtgctcacgcctgacttcctgaaccgctgccgcatgcatgccatctccggctggcaggccttctttcccatgcatttccaagccttccacccagctgtggccccaccacaagggcctgggcccccagagctgggccgtgacactggccgctttgatcgccaggcagccagcgaggcctgcttctacaactccgactacgtggcagcccgtgggcgcctggcggcagcctcagaacaagaagaggagctgctggagagcctggatgtgtacgagctgttcctccacttctccagtctgcatgtgctgcgggcggtggagccggcgctgctgcagcgctaccgggcccagacgtgcagcgcgaggctcagtgaggacctgtaccaccgctgcctccagagcgtgcttgagggcctcggctcccgaacccagctggccatgctactctttgaacaggagcagggcaacagcacctgaccccaccctgtccccgtgggccgtggcatggccacaccccaccccacttctcccccaaaaccagagccacctgccagcctcgctgggcagggctggccgtagccagaccccaagctggcccactggtcccctctctggctctgtgggtccctgggctctggacaagcactgggggacgtgcccccagagccacccacttctcatcccaaacccagtttccctgccccctgacgctgctgattcgggctgtggcctccacgtatttatgcagtacagtctgcctgacgccagccctgcctctgggccctgggggctgggctgtagaagagttgttggggaaggagggagctgaggagggggcatctcccaacttctcccttttggaccctgccgaagctccctgcctttaataaactggccaagtgtgaaaaaaaaaaaaaaaaaaaaaaa

SEQ ID NO: 192 - DNA, 3937 bp, Homo sapiens
gcggcgccctcgtccgcttccaagcccagcacagacttcggtttctccgcctccatcccctttacgagaagaggagatcaaaaaatattgccctttaggtgctcgtgatggtcctgtgggttcgttcagttgccagaaaagaatggtaacatgaacagcggagcgtgagagcgtcaccgggggaagggacgagattgatgggcagagcgctcacttctcagaggatcgcattccgaggaccgcgcgaggaagggacgtcgcggcgccaccacttcctggctggactccgctgacatctgtagcctcctttccaccaggttcccggggctcccagccgctgcctgcagaggagcgtgtagacagcgcgcgagggtccggcacttcgtggacctccatccgaaccggagttctgcccggatcccgagtccctggatcccggtggagcccgccggcaagctggctccggagggagttgaacttgagttcagatggccaactccctctgaatcctgcagattggtgctgagcacgcaacaaaagtttgtagcttctcagtttctggtgcttcgcaggggagaggaaaggaatttgacattaaacacaagaagcagtcagggagccatctcctttaacttttcttctctgttaccatttgcaatgaagaggaaacagaagagatttctgcagatgactttgttgttcacggtggctttaattttcctgcctaacgttggtctctggtctctgtacaaggataagcacctggtgaagtcagcggagcccggggagcagcagacatttccactgggcctgggagatgggcaattctattcatggacagatggtttgagaagaaaggactggcatgactatgaaagcattcagaaagaggctatgcgctcaaggaaaggtgaacatgggaaaccttacccccttactgaagaggaccatgatgactcagcttacagggaaaatggttttaatattttcgtcagcaacaatattgctctagagaggtctctgccagatattcgtcatgctaactgtaagcataagatgtatctggaaaggctgccaaacaccagcatcattatcccatttcataatgaaggttggacttcactcctgcggaccatacacagtataattaaccgaaccccagggagtctgatagcagaaatcattctagtagatgacttcagtgagagagaacacctgaaggataaattggaagaatacatggcccgattttccaaagtgaggattgttcgcaccaagaaaagagaaggactcatccggacccgtctcctgggggcatctatggccagaggagaagtcctgacattcctggactcccactgcgaggtcaatgtgaactggctgcccccactcctcaaccaaattccactaaaccacaaaaccatcgtgtgtcccatgatcgatgtcattgaccacaatcacttcgggtatgaggcacaagctggggatgccatgcgaggagccttcgactgggaaatgtactacaaaagaatccccatccctccagagctccagagggcagatcccagcgacccttttgagtctcctgttatggctggaggtctctttgctgtggatcggaaatggttttgggaattgggtggctatgatccaggtttagaaatctggggaggagaacagtatgaaatctcttttaaggtttggatgtgtggaggagaaatgtttgatgttccatgttctagagttggtcatatctacaggaagtacgttccatacaaagttccatctgggacaagcctggcaagaaacctgaagcgggtagctgagacctggatggatgaatttgccgagtacatttaccagcggcggccggagtacaggcatctctccacgggggacatctctgcccagaaggagctgcgcaagcagctcaagtgcaaggacttcaaatggttcatggctgctgtggcctgggacgtgcctaaatactaccctccagtggagcccccgcctgctgcctggggggagatccgaaatgtggcagcaaatctctgtgtggacagcaagcatggagccaccggaacagagctgaggctggacatctgtgtcaaggatggttctgaaagaacatggtctcatgaacagctttttacctttggatggagagaagatattcgacccggtgagccactgcatacccggaaattctgctttgatgcgatctcacacaacagccccgttacactctatgactgtcatggcatgaaggggaaccagctctggggataccggaaggacagaacattattccatcctgtgagcaacagctgcatggattgcaaccacgcagagaagaagattttcatggccagatgtgaccctctctctgagactcagcagtggatttttgaacacattaatatgactgttttagaaaaatttaaccaccatgccaactcctagaaagaagaaaggaagaaagagtgattacctacaggttataaattaaattttagccagcatctgggtcgaaggagtcaggaataacatttcctcgatccaggaaggctggtttaaaaatttgcaaatgccatgtcaaagtaggttgttttgaagaacttcctgcatctgaagaacttggctgagaatctcaccagctgcttctgagaactcgagactagcagttcccttgctggccaagggcaaagataatttagggacttttcaaaacaactgctgagctaataaatcctagcatttctcaggtcaaatcctgcagtagtgagtagctatgaatggatcctattaactgggtgggaggggggtgaaaatggagtgcatgactgctctgacaacctgaggatatcacaggtttagaactagccaagcttaaggggtgagctgtactctttggtgccattctctgactaagaatgggttcagcaggtttaacccttaaaagtgctgcagatgatttcagagtgctcacactattctgttttttttatttttatttttaaatgagggtgcaatatctaatgtaagacttaaattacataatgaaatggacatccagtgttcccattctttcgtttatatttgccatttttttttcagagcaaagtttcttttttatgaaagttcatgctccatgaatccactgaatttctaattcagtgcccttctatgaatccagttaaaaacaaaagcaaaagcaaaaatctatgctatcaagttactccaaagaaagatttcacagaagcagcaaaaccatataagatttaggagagggacttccctgggaaatctatttttacttttctattatttttaaaatcttaaaagtctgatatttgtccagtcataatttttattaagcaaggaaatggagtgagtttgatgtaatttgtttaggagattcttaaacccaaataaatctacactccaagtgatatgtgaaaatggcttagttcacttcaattctgtttagtcagtggtgggagcttagaagtggttttatttgttcgtttgtttgggttttgcttttgttttttatttttttcttgttttttttttgtagtgttgaattaatgatgttcttttatttggaagctcataaaaggaattaccattaataaagtgtttctgacaccattttctgttaatgggacaatatttcggggatgaagaaaggaatgctccgaaaactaaatggaacacttaatccttaaagcaattttttactgttcaataatatcacattgggggaagaaaacacaggtatcaaggtggttcttgggaaaaaagaatcatgtttattatatatctctcaagtttttttggtataaaaatgttttaactttgctttctttttggtttttgtttgaagttggttttcctgttaataaaaatttatataacaaaaaaaaaaaaaaaa

SEQ ID NO: 193 - DNA, 2786 bp, Homo sapiens
atggctgtgcgctctcgccgcccgtggatgagcgtggcattagggctggtgctgggcttcaccgccgcgtcctggctcatcgcccccagggtggcggagctgagcgagaggaagagacgtggctccagcctctgctcctactacggtcgctctgctgctggcccccgcgccggcgctcagcagccgctcccccagccccagtcccgaccacggcaggagcagtcgccgccccccgcgcgccaggatctccaggggccaccgctgcccgaggcagcacccgggatcaccagttttcgaagcagcccctggcagcagccacctccgctgcagcagcggcggcgaggacgcgagcctgagggcgcgacggggcttcccggtgctccagcggccgagggggagcccgaggaggaggacgggggcgcggctgggcagcggagagacggccggccggggagtagccacaacggcagcggggacgggggcgctgccgccccgagcgcccgaccccgggacttcctgtacgtgggggtgatgaccgcgcagaagtacctgggcagccgcgcgctggccgcgcagcggacctgggcgcgtttcatcccgggccgcgtggagttcttttccagccagcagccccccaacgccggccagcccccgccacccctgcctgtcatcgcgctaccgggtgtggacgactcctatcctccccagaaaaagtccttcatgatgatcaagtacatgcacgaccactacctggacaagtatgagtggttcatgcgcgccgacgacgatgtctacatcaaaggtgacaaattagaagagtttcttagatcgctaaacagcagtaagcctctctacctgggacagactggcctggggaatattgaagagcttggaaagctgggactggagcctggggaaaacttctgtatgggaggacctggcatgatctttagccgagaagttctcaggaggatggtgccacatattggtgaatgccttagagaaatgcacacgactcatgaggatgtggaagtaggaagatgcgttcgccgctttggtagggctcagtgtgtgtggtcttttcagatgcaacaactgttccatgaaaattatgaacacaatcggaagggttacatccaagaccttcacaatagcaaaatccatgcagccataacacttcatcccaacaaaaggcctgcataccaatacaggctgcataattacatgctcagccgcaaaatttctgaacttcgctaccgcaccatccagctccacagggaaagtgccctgatgagcaagctcagtaacacagaagtgagcaaagaggaccagcagctgggagtgataccttctttcaaccacttccagcctcgggagagaaatgaagtgatagaatgggagttcctgacagggaagcttctatactcagcagctgagaaccagccccctcgacagagcctcagtagcattttaagaacagcactggatgataccgtcctacaggtgatggagatgatcaatgagaatgccaagagcagaggacggctcattgacttcaaggaaattcagtatggctaccgcagagttaaccccatgcacggggtggagtacattttggatttactccttttatacaaaagacacaagggaaggaaactgactgtgccagtgagacgtcatgcctatcttcagcagttgttcagcaagcctttcttcagagagaccgaagagctagatgtcaacagtcttgtggagagtattaacagtgaaactcagtcattctcctttatatctaattctttaaagatattatcttcttttcaaggtgccaaagaaatgggagggcacaatgaaaagaaagtacacattctcgttcctctcatcggaaggtatgacattttcttgagattcatggagaactttgaaaacatgtgtcttatcccaaagcagaatgtaaagttggtcattatccttttcagtagggattctggccaagactccagcaagcatattgagctgataaaagggtaccagaacaagtaccccaaagcagaaatgaccctgatcccaatgaagggagagttttccagaggtcttggtcttgaaatggcttctgcccagtttgacaatgacactttgctgctattttgtgatgttgacttgatcttcagagaagattttctccaacgatgtagagacaatacaattcagggacaacaggtgtactatcccatcatctttagccagtatgacccaaaggtaacaaacgggggaaatcctcccactgatgattacttcatattctcaaaaaagactggattttggagagactatggatatggcatcacctgtatttacaaaagtgatcttctaggtgcaggtggatttgatacctcaatacaaggctggggactagaagatgtagatctctacaataaagtcattctatctggcttaaggccattcagaagccaagaagtaggagtggtgcatattttccatccagttcattgtgatcctaacttggaccctaagcagtataagatgtgcttaggatccaaggcaagtactttcgcctcaaccatgcaactggctgaactctggcttgaaaaacatttaggtgtcaggtacaatcgaactctctcctgacagtccaggcaacacattttgccttttttaaggggagtttacctcattgttggttgttgttatttttattgtattattgttattttattattattattgttataattttattttgttgtcctggtcttaaactactc

SEQ ID NO: 194 - DNA, 2170 bp, Homo sapiens
ggctcgagagttatacgtgaacggagacctgaggctgcagcagaagcagccgctgagctgtggtggcctagatgcccgatacaacatatccgtgatcaacgggaccagcccctttgcctatgactacgacctcacccatattgttgctgcctaccaggagaggaacgaaagctcccagtgaggaactggtcttctggagactctgtgtggcatagagtgattcaaccaccttaagaagacctctggctttcctggaacacagatgtcgagacatctcccatggatttgtgatcagcgttgcagctctcccagcagccctggacggtggcccccagccgcccgcatgtggctgccacggttctccagcaagacagtgacagtgctcctcctggcacagaccacctgcctcctgctcttcatcatctcccggccagggccctcatccccagccggcggcgaggatcgtgtgcacgtgctggtgctgtcctcgtggcgctcgggctcatccttcttgggccagctcttcagccagcaccccgacgtcttctacctgatggagcccgcgtggcatgtgtggaccaccctgtcgcagggcagcgcggcaacgctgcacatggccgtgcgcgacctgatgcgctctatctttttgtgcgacatggacgtgtttgatgcctacatgccacagagccgaaacctgtccgcctttttcaactgggcaacgagccgcgcgctgtgctcgccgcccgcctgcagcgcctttccccgaggcaccatcagcaagcaggacgtatgcaagacactgtgcacgcggcagccattcagcctggcccgggaggcctgccgctcctacagccacgtggtgctcaaggaggtgcgcttcttcaacctgcaggtgctctacccgctgctcagcgaccccgcgctcaacctgcgcatcgtgcacctggtgcgcgacccgcgggccgtgctgcgctcccgggaggcggcgggcccgatactggcacgcgacaacggcatcgtgctgggcaccaacggcaagtgggtggaggccgaccctcacctgcgcctgattcgcgaggtgtgccgcagccacgtgcgcatcgccgaggccgccacactcaagccgccacccttcctgcgcggccgctaccgcctggtgcgcttcgaggacctggcgcgggagccgctggcagagatccgcgcactctacgccttcaccggcctgaccctcacgccacagctcgaggcctggatccacaacatcacccacgggtcggggatcggcaagccaatcgaggccttccatacttcgtctaggaatgcgcgcaacgtctcccaggcctggcgccacgcgttgcccttcactaagatcctgcgcgtgcaggaggtgtgcgccggcgcgctgcagctgctgggctaccggcctgtgtactctgcggaccagcagcgtgacctcaccctggatctggtgctgccacgaggcccagaccacttcagctgggcatcgcctgactgagaactctgggccttagagcaagccccgaactgtggtcgccaggcccaggaggcgactgcatggtggagagggagctggggcgcatggggaagcaggtccctactatcaaccgggagtttggggtcctcccctgaagtaggcaaggactgcacgtttctttctctcctgattctcggttttcctttgagtcttctggagctgccttctcatcaggtgcactcttcatggaaagcaactcttgcccctacctcttctgggcgcagggagtaagttactgctaaattaaattaaatgtgtgccaggccgggtgcggtggctcatgcctgtaatcccagcattttgagaggctgaggcgggtggatcacctgaggtcaggattcaaaaccagcctggccaacatagtgaaaccccctctctactaaaaatgcaaaaattagtccggcgtggtggcacactcctgtaatcccagctacttaggaggctgaggtgggagaatcacttggactccaaaggtggaggttgcagtaagctgaaatcatgccactgcaccctagcttgggtggcaaagcaaaactctatcaaaaaaataattaataaatttgttcaaaagtcctgccgaaaaaaaaaaaaaaaaaaaaaaaaaaaaaaaaaaaa

SEQ ID NO: 195 - DNA, 1206 bp, Homo sapiens
atgggctcttggaagcactgtctttttagcgcgtctcttatctctgccctgatttttgtatttgtttacaatactgagttatgggagaataaacgttttctgagggcagctctgtccaatgcttcactgttagcagaagcctgtcatcagatttttgaggggaaagttttttacccaacagaaaatgcattgaaaactacccttgatgaagctacctgctatgagtacatggttcgaagccactatgtaacagaaacactctctgaagaagaggctgggttccctttagcttacacagtgaccatccacaaagacttcggcacttttgagaggctcttcagggcgatttatatgccccaaaatgtctactgtgtgcacctggatcagaaggcgacggatgcctttaaaggtgcagtgaaacagttactcagctgcttcccaaatgcttttctggcttccaagaaggagtcggttgtctatggggggatctccaggctccaggctgacctgaactgcctggaagaccttgtggcctctgaagttccctggaagtatgtcatcaacacctgcgggcaagactttcccctgaaaaccaacagggaaatagttcagtatctgaagggatttaaagggaaaaatatcacccccggagtgctgcctcctgaccacgctgttggacggactaaatacgtccaccaagaactgttaaaccacaaaaattcctacgtgattaaaacaacaaaattaaaaactcctcctcctcatgacatggtgatttactttggcacggcctacgtggctctcacaagggactttgctaacttcgtcctccaagaccagctcgcacttgacttactctcctggtccaaggacacctacagccccgacgaacatttctgggtgacactcaacaggattcccggtgttcctggctctatgccaaatgcatcctggactggaaacctcagagctataaagtggagtgacatggaagacagacacggaggctgccacggccactatgtacatggtatttgtatctatggaaacggagacttaaagtggctggttaattcaccaagcctgtttgctaacaagtttgagcttaatacctacccccttactgtggaatgcctagaactgaggcatcgcgaaagaaccctcaatcagagtgaaactgcgatacaacccagctggtatttttga

SEQ ID NO: 196 - DNA, 5674 bp, Homo sapiens
gggagaagtgaccaggcggcggcggctctgctgaggtgacaacgtgctagcagccctcgctcgctctgggcgcctcctcggcctcagcgtccgctctggccgcgctcgaggagcccttcagcccgccgctgcgctatgaaggcccctctctggggctggccgaggctggagccggctccctctgctcgcgggcaagtgtgaagagagaggcgcgggcgggagccggggctgcgcgcggcgctcgcgggccggcgcgggttccaggtgagcgcggactcggcgagccccgcactcggcgcggccggccggcgcctgctgggcttgatctgaggctgaatcccgtgtgtggaccgccgttccctcttcgcgggatcgttggccaggatagcagatgcatttttgtagaagcattttgaggatgaatgtttgcaaatcattttgaaattgccaagtgccacatacatggaatgtatcctgctttcatcttggagttcacctgtgtggcttggatttatcacagtagcatttgtcttcaatctgtgtgttaactagaaatcaaggaaagacatgaggagatttgtctactgcaaggtggttctagccacttcgctgatgtgggttcttgttgatgtcttcttactgctgtacttcagtgaatgtaacaaatgtgatgacaagaaggagagatctctgctgcctgcattgagggctgttatttcaagaaaccaagaagggccaggagaaatgggaaaagctgtgttgattcctaaagatgaccaggagaaaatgaaagagctgtttaaaatcaatcagtttaaccttatggccagtgatttgattgcccttaatagaagtctgccagatgtaagattagaaggatgtaagacaaaagtctaccctgatgaacttccaaacacaagtgtagtcattgtgtttcataatgaagcttggagcactctccttagaactgtttacagtgtgataaatcgttccccacactatctactctcagaggtcatcttggtagatgatgccagtgaaagagattttctcaagttgacattagagaattacgtgaaaaatttagaagtgccagtaaaaattattaggatggaagaacgctctgggttaatacgtgcccgtcttcgaggagcagctgcttcaaaagggcaggtcataacttttcttgatgcacactgtgaatgcacgttaggatggctggagcctttgctggcaagaataaaggaagacaggaaaacggttgtctgccctatcattgatgtgattagtgatgatacttttgaatatatggctgggtcagacatgacttatgggggttttaactggaaactgaatttccgctggtatcctgttccccaaagagaaatggacaggaggaaaggagacagaacattacctgtcaggacccctactatggctggtggcctattttctattgacagaaactactttgaagagataggaacttacgatgcaggaatggatatctggggtggagagaatcttgaaatgtcttttaggatttggcaatgtggaggctccttggagattgttacttgctcccatgttggtcatgtttttcggaaggcaactccatacacttttcctggtggcactggtcatgtcatcaacaagaacaacaggagactggcagaagtttggatggatgaatttaaagatttcttctacatcatatccccaggtgttgtcaaagtggattatggagatgtgtcagtcagaaaaacactaagagaaaatctgaagtgtaagcccttttcttggtacctagaaaacatctatccggactcccagatcccaagacgttattactcacttggtgagataagaaatgttgaaaccaatcagtgtttagacaacatgggccgcaaggaaaatgaaaaagtgggtatattcaactgtcatggtatgggaggaaatcaggtattttcttacactgctgacaaagaaatccgaaccgatgacttgtgcttggatgtttctagactcaatggacctgtaatcatgttaaaatgccaccatatgagaggaaatcagttatgggaatatgatgctgagagactcacgttgcgacatgttaacagtaaccaatgtctcgatgaaccttctgaagaagacaaaatggtgcctacaatgcaggactgtagtggaagcagatcccaacagtggctgctaaggaacatgaccttgggcacatgaagatcatgtcctccaagccatgaaagtgtctacgcttttgtttttccattatttcaattgggggaaaatattaactttgctgaattgaaagttttaaaaatccttttagtattctaaaacacaattgtttctaattcgtttctagaaatgtttgcttatttccctactaaaatttgtatctgatcaaagcacataagaatataaataatagcaaactactattaaacaacagaacaacttgtaaaacaaattgtgtttgctttaagaaaaatctttattgcactcatgtcatagggttaattggaggttattttatttttggttgtcatggtgattgaaagagataatgtaaatgccttataaaatcttcattatgaaatattatcagttgctttataaactcactctttttatggatccttcatggaaacatgtttgatttctgtgtctacaacagggccacatattaaattacttctgaatggtgaattcatcttacaaaatgttccaagttttggacaaggaaaaacattacattggatattgaattcatggagcctttacagaagcatcacatttaaaccaatgtgaattcaaaaaagagaaggaaactttttaaattcaatttagagtacataaaaaaagaaatccgcgaagcattgaggggaacaagatgagtctaatccgcagcacttcgatcactgtgagagaactcaaagtgggttgcaatcattcctaacacaggctgaaactaaacaatcttgctcctagagtttatgttggatactcaattcttaaccaaaatcttggtctccacaaactctaccatcccttttctcttcactctatagacagtggcatgccattgatgctgtacagaattgcaggtgaaagggagaattttagacttaatttttaactctattgcacttaaagattttagttaggttaccactgtcattttcattttctatgttaaagaatacctttcagtgctgtgctccagtatctaaaaattttatcaccaggggaataaactcaatacacattcattaaacttttgttgtaattaaactgctatatattgtttgccatatattatggcccaaggaatatagttataatcaggctacattcacattttcttttctcatcttaaaaccctttatgttcaaaatacattagcagaggccatgaaagtgaaaaaaaatcagatttttgctagtaagtttttatatttgacatcattttaaatgctcaaagagttgccctatatatgcatgttatccattataaatgcactcagcagctaagagaaatttgagaggaaaagtggaagaagtgttttctggagcagaagattccacttctttggtcctcatctttacttaaaaagctcttatagaaaggattaatcattttgactgcatacaaactatgtctctgacatgcacatacactgctttataatgaaaatgaggacactttctgatggtcagtaaaatcttaaatgatttttgccactggtattccttcctcttttgactttttattggtacaactgtagggaagaatctacaacctggagcatttcaggtttgctctttaaatatagacacccctcaccatgagctctctgtgaatccgtgaatttcctaaaattgtaagcaaaatgttgaatatcagggcatttttttttctgaggtgggagtatgtcactcacagcaaacttggaaagaaggctatgactcccaagaggcagtgaaccattgccttaaattaatagcagcctctcaagtccattgaggcctcatgtaaaattcccatttttcatctttacactccttttctcccctcatttcctcttctccttactaaggtaaaaagaccctgcacagcattattacttaagttgaaaaagcttcaactctcaaggactcatgtataccatatgttccacttattgctttgttagtcaaaatgcatgttatgtagaaaatggtcaatggcaaatttttataaatacagctaccccatcaaagctgaacttgaaacgttttagcagaattttaaatatgtgaaagttcattgtggtcatggtgagaaaactaaaactacatgagtttcatgttagaaaagaatttttaaacaatcttcagatggcttgaacacgtgccattatagtatctaacaaaaagtggcataaaatattacaaaacatccaacactagaaagcaatgactaacatttaatttgtttacaaaaatgtttattgtcttcagtacaaaaagttaaaaccatgattggattcataatgcacttgtcttatcccttatttatggagctagactgacatatttcaaaccaatctcttctgtggtcttctccatctcagttaatgcaacttcaaccttccagatgctcaggtcaaaaactgaaagttgcttttgactcctctatttctgtttcaactctcgtctaatccaacagcaaatccccttgatgctacctttgaaatataactagaaaagaatgacttgccaccatatccactaggtgtcactacctctaacctttttaatcgcaatatgcttattatttagttccctaatttcccagtccttgtcttgaacaatcttttctcagtacaacagccatagtgattctgttaaccatgaatttgattgtgtcacttccctgctcacaatcttccaatgacttctccctccggtggccttcaaggtcctttatgagtgttacccctctacacgtccacaccactcaccacacatacatacacatgcacacacacacacatgcaattctacctttttctaacaccatctcttatctctcattattctgcctcttacttaccctattatggctcccaagaaagttcctgctttagtgttttgttccctctgccccagagagctccccttagtgatctcagttcaaatattatcttatcagtaagacaaacccttctcccatctgccttccctatcccctgtacctgacaatctatgagtttgcttctttatttctgtctatacttccccctccccagccccaaacatgcccatcacatgccctagaaggtaagtcccatgaaggcaggggctttgtcagttttgttcatttggtatttctggcatatatattctctaaatatttcttgaattaatgaactgaaaaatgtgtgttaaagttgctaagtgtaactgtatcatactttttttgtattttaaattttaaaataaaggctaatatatttagacaggatttccaaaaactttgtcttcaaattttaattttcttcctaatattcttcacattaaactatggactctaattttctggataaaatatcctgccttatggaaatgaaatatgaaattttattaaaatgctgctatattaaaaaaaaaaa

SEQ ID NO: 197 - DNA, 1312 bp, Homo sapiens
ctagaattcagcggccgctgaattctagaacccaggtgcaactgacatgggtgaaccccagggatccatgcggattctagtgacagggggctctgggctggtaggcaaagccatccagaaggtggtagcagatggagctggacttcctggagaggactgggtgtttgtctcctctaaagacgccgatctcacggatacagcacagacccgcgccctgtttgagaaggtccaacccacacacgtcatccatcttgctgcaatggtggggggcctgttccggaatatcaaatacaatttggacttctggaggaaaaacgtgcacatgaacgacaacgtcctgcactcggcctttgaggtgggggcccgcaaggtggtgtcctgcctgtccacctgtatcttccctgacaagacgacctacccgatagatgagaccatgatccacaatgggcctccccacaacagcaattttgggtactcgtatgccaagaggatgatcgacgtgcagaacagggcctacttccagcagtacggctgcaccttcaccgctgtcatccccaccaacgttttcgggccccacgacaacttcaacatcgaggatggccacgtgctgcctggcctcatccacaaggtgcacctggccaagagcagcggctcggccctgacggtgtggggtacagggaatccgcggaggcagttcatatactcgctggacctggcccagctctttatctgggtcctgcgggagtacaatgaagtggagcccatcatcctctccgtgggcgaggaagatgaggtctccatcaaggaggcagccgaggcggtggtggaggccatggacttccatggggaagtcacctttgatacaaccaagtcggatgggcagtttaagaagacagccagtaacagcaagctgaggacctacctgcccgacttccggttcacacccttcaagcaggcggtgaaggagacctgtgcttggttcactgacaactacgagcaggcccggaagtgaagctggaagacaggatcaggtgccagcggaccatcggctggcagagcccagcggccaccacccgtcaaccctgccaggagctgagggcaccacccagcaacctgggcctgcattccatccgctctgcagccccaagcatctttccagtggggcccccattcacgttggtcctcagggaaaccagggtccggggcaggcccggcgctttgctccccacaccagccccctgcgcgtgtccactctgatcctgcatcccactccctgggagccaataaagtgcattttcacagaaaaaaaaaa

SEQ ID NO: 198 - DNA, 2567 bp, Homo sapiens
ctccggcgcagtgttgggactgtctgggtatcggaaagcaagcctacgttgctcactattacgtataatccttttcttttcaagatgcctgaggaagtgcaccatggagaggaggaggtggagacttttgcctttcaggcagaaattgcccaactcatgtccctcatcatcaataccttctattccaacaaggagattttccttcgggagttgatctctaatgcttctgatgccttggacaagattcgctatgagagcctgacagacccttcgaagttggacagtggtaaagagctgaaaattgacatcatccccaaccctcaggaacgtaccctgactttggtagacacaggcattggcatgaccaaagctgatctcataaataatttgggaaccattgccaagtctggtactaaagcattcatggaggctcttcaggctggtgcagacatctccatgattgggcagtttggtgttggcttttattctgcctacttggtggcagagaaagtggttgtgatcacaaagcacaacgatgatgaacagtatgcttgggagtcttctgctggaggttccttcactgtgcgtgctgaccatggtgagcccattggcaggggtaccaaagtgatcctccatcttaaagaagatcagacagagtacctagaagagaggcgggtcaaagaagtagtgaagaagcattctcagttcataggctatcccatcaccctttatttggagaaggaacgagagaaggaaattagtgatgatgaggcagaggaagagaaaggtgagaaagaagaggaagataaagatgatgaagaaaaacccaagatcgaagatgtgggttcagatgaggaggatgacagcggtaaggataagaagaagaaaactaagaagatcaaagagaaatacattgatcaggaagaactaaacaagaccaagcctatttggaccagaaaccctgatgacatcacccaagaggagtatggagaattctacaagagcctcactaatgactgggaagaccacttggcagtcaagcacttttctgtagaaggtcagttggaattcagggcattgctatttattcctcgtcgggctccctttgacctttttgagaacaagaagaaaaagaacaacatcaaactctatgtccgccgtgtgttcatcatggacagctgtgatgagttgataccagagtatctcaattttatccgtggtgtggttgactctgaggatctgcccctgaacatctcccgagaaatgctccagcagagcaaaatcttgaaagtcattcgcaaaaacattgttaagaagtgccttgagctcttctctgagctggcagaagacaaggagaattacaagaaattctatgaggcattctctaaaaatctcaagcttggaatccacgaagactccactaaccgccgccgcctgtctgagctgctgcgctatcatacctcccagtctggagatgagatgacatctctgtcagagtatgtttctcgcatgaaggagacacagaagtccatctattacatcactggtgagagcaaagagcaggtggccaactcagcttttgtggagcgagtgcggaaacggggcttcgaggtggtatatatgaccgagcccattgacgagtactgtgtgcagcagctcaaggaatttgatgggaagagcctggtctcagttaccaaggagggtctggagctgcctgaggatgaggaggagaagaagaagatggaagagagcaaggcaaagtttgagaacctctgcaagctcatgaaagaaatcttagataagaaggttgagaaggtgacaatctccaatagacttgtgtcttcaccttgctgcattgtgaccagcacctacggctggacagccaatatggagcggatcatgaaagcccaggcacttcgggacaactccaccatgggctatatgatggccaaaaagcacctggagatcaaccctgaccaccccattgtggagacgctgcggcagaaggctgaggccgacaagaatgataaggcagttaaggacctggtggtgctgctgtttgaaaccgccctgctatcttctggcttttcccttgaggatccccagacccactccaaccgcatctatcgcatgatcaagctaggtctaggtattgatgaagatgaagtggcagcagaggaacccaatgctgcagttcctgatgagatcccccctctcgagggcgatgaggatgcgtctcgcatggaagaagtcgattaggttaggagttcatagttggaaaacttgtgcccttgtatagtgtccccatgggctcccactgcagcctcgagtgcccctgtcccacctggctccccctgctggtgtctagtgtttttttccctctcctgtccttgtgttgaaggcagtaaactaagggtgtcaagccccattccctctctactcttgacagcaggattggatgttgtgtattgtggtttattttattttcttcattttgttctgaaattaaagtatgcaaaataaagaatatgccgttttaaaaaaaaaaaaaaaaaaaaaaaaaaaaa

SEQ ID NO: 199 - DNA, 3745 bp, Homo sapiens
cggcggcgggcccaaggcgtgaggcgccgcccgggtgtccccgcggcgcaggaggcggtggagcgcagagcgggcgagcgcgaaaaatcactaccaatataatggattttatatatcagattgctttattctggatatcatggtaacaatacagaaagtatacataatttcccatttctgcaagtagtcatgactgctgaagaaagaaaaacttaaagctacggcagaattattttatggaaattctgattttgtttttaatttttgataactttttactaaaggtatgaacacacaaagagcttattttgttaggcaaatacacattaataagaatgcctagaagaggactgattcttcacacccggacccactggttgctgttgggccttgctttgctctgcagtttggtattatttatgtacctcctggaatgtgccccccagactgatggaaatgcatctcttcctggtgttgttggggaaaattatggtaaagagtattatcaagccctcctacaggaacaagaagaacattatcagaccagggcaaccagtctgaaacgccaaattgcccaactaaaacaagaattacaagaaatgagtgagaagatgcggtcactgcaagaaagaaggaatgtaggggctaatggcataggctatcagagcaacaaagagcaagcacctagtgatcttttagagtttcttcattcccaaattgacaaagctgaagttagcataggggccaaactacccagtgagtatggggtcattccctttgaaagttttaccttaatgaaagtatttcaattggaaatgggtctcactcgccatcctgaagaaaagccagttagaaaagacaaacgagatgaattggtggaagttattgaagcgggcttggaggtcattaataatcctgatgaagatgatgaacaagaagatgaggagggtccccttggagagaaactgatatttaatgaaaatgacttcgtagaaggttattatcgcactgagagagataagggcacacagtatgaactcttttttaagaaagcagaccttacggaatatagacatgtgaccctcttccgcccttttggacctctcatgaaagtgaagagtgagatgattgacatcactagatcaattattaatatcattgtgccacttgctgaaagaactgaagcatttgtacaatttatgcagaacttcagggatgtttgtattcatcaagacaagaagattcatctcacagtggtgtattttggtaaagaaggactgtctaaagtcaagtctatcctagaatctgtcaccagtgagtctaattttcacaattacaccttggtctcattgaatgaagaatttaatcgtggacgaggactaaatgtgggtgcccgagcttgggacaagggagaggtcttgatgtttttctgtgatgttgatatctatttctcagccgaattccttaacagctgccggttaaatgctgagccaggtaagaaggtgttttaccctgtggtgttcagtctttacaatcctgccattgtttatgccaaccaggaagtgccaccacctgtggagcagcagctggttcacaaaaaggattctggcttttggcgagattttggctttggaatgacttgtcagtatcgttcagatttcctgaccattggtggatttgacatggaagtgaaaggttggggtggagaagatgttcatctttatcgaaaatacttacatggtgacctcattgtgattcggactccggttcctggtcttttccacctctggcatgaaaagcgctgtgctgatgagctgacccccgagcagtaccgcatgtgcatccagtctaaagccatgaatgaggcctctcactcccacctgggaatgctggtcttcagggaggaaatagagacgcatcttcataaacaggcatacaggacaaacagtgaagctgttggttgaaatcataattaatgcgttactgtatgaaccacaaaacagcactatttatttagccttacttctacttccagatgcagtgcctcttttggagaagacatgtttatttttcatgttctttctgacattactttagcaattcaacttgatgtgagaagaaaaaacaaatgtttcaacacaaaatctctgttttgtgagaatactgcactatggaataattgacaaattgaaatctcatatttgtcccaaaagttgttttgagttagttctacctggtgcccatgttctgattgtgtgtgggattgcatggtgtcctgattgcatctaggtggagcggatggaatgtgctgggccactgttgggtggagagcagcacattcttacagaggagatggagcgttatgagcatagtatgtggataggtatcttcacctgcccgcccctgagtcagcctccttgacttgatagcttgaagaatccttttccactgaaatagaggataattaattgacacatctgaaatccccaatcaatcaatcaagagaaaggtagaactaaaaactccttaacttactgttgcttacacccctgaaagtctgtttttaagcaaatgggtaatagtagaaaataggttagaatctatggcttgattaaaaatatgttattacattatcatgttcaggattaggattagtagtcagttgctgtaaactattttgaacaaacagaaaagaacacggaaacatttttaacagagcatttaattatgttggaatacaggatcctagctctgtctgggaacattagtttatgtgagccagctctatcagggtcttcccatggtggttcagaatagatgagcatagcatggttttgtttgtttttgctttcaattttctaatttggcatggatccatatgtatttactatcctttttctaatatattaatatatgctacatttgtatttgcattactataatactttgagttgaaaaagagtttcattgtggagagaaaaagcaaatggtatgccacaagatcactctgatttgagaaaagggaggaggggaagatagtctgaatggaaatctgaaatacggaatgttttagagaaatatgtcacttgcatatagaatgttttaattgaggtataaattaatgagacaaagtgaaaaagaaattatattcagataggactgcactacattatttgtcacacatggatctgttaccatcaggtcaattcctagtatgcataaattttttaacccttttaaaagagacctatgttgaaaacccctgaaaattcactgaagaaaaatcattactctttttctcagtaaatcatatcatctgaaatattacaaatttcaaatttctaggtgctatattaattcaatattacaataactcttacctaattattcttacaagttttaagttgtggtagtttagtgatttttttaaaagatgtgtgaaatgttctctgcaaaataattcaggccactgtctccttttatatattattataattatttattatgaagaccagtgaattacgatatttaaagtgagagaacttaattatttgcaaaggtaagttacagcttgttttttgagagaatcaaatgagtttacttttgttcctgttgtttttaactagctttaagtttaaagatggaagctaagcaatggaaatgctatacgtttttgacatttattaaatggtaccaataaagtattttattaccaaaagttaaaaaaaaaaaaaaaaaaaaaaaa

SEQ ID NO: 200 - DNA, 1380 bp, Homo sapiens
gtctctgcccatccgcgcacccgggcttcggctggagagggccagctcgcttcaggaggccgaaccccgttcccaccaaccctctcagctcagacgcggggtgctgagtcacggggggggggtggttctgtggatagttggaatgcatacacagaggaaagggggatgcggcaccagcagacagagagacaagaccccagccagcccctgtccaggcagcatggcacataccgccagatcttccatccagagcagctcatcacaggcaaggaagatgctgccaataactatgcctggggccactacaccattgggaaggagttcatcgacctgctactggaccggattcggaagctggctgaccagtgcacaggacttcagggcttcctggtgttccacagccttggtcggggcactggctctgacgtcacctcattcctgatggagtggctttctgttaactatggcaagaaatccaagctgggattctccatctacccagccccccaggtgtctacagccatggtccagccctacaactctatcctgaccacccacaccaccctggagcactcagactgtgccttcatggtggacaacaaagcaatctatgacatctgccaccgcaacctagacattgagcgcccaacctacaccaacctcaatcgcctcattagccaaattgtctcctccatcacagcttctctgcgctttgacggggccctcaatgtggacctgacagagttccagaccaacctggtgtcctacctcacatccacttccccctggccacctatgcaccagtcatctctgcagaaaaagtataccacgagcagctgtcggtggcagagattaccaatgcctgctttgagcctgccaaccagatggtgaagtgtgatccccggcacggcaagtacatggcctgctgcctgctataccatggagatgtggtgcccaaggatgtcaacgctgccattgctgccatcaagaccaagtgcagcattcagtttgtggactggtgccccacaggctttaaggttgatatcaatcaccagcctcccactgtggtgcctgggagtgacctggtaaagtgcaacgtgccatgtgcatgctgagcaacatgacagccatcactatggcctgggcccgcctggaccacaagtttgacctgatgtatgccaagagggcgtttgggcactgatatgtgggtgagggcatggaggagggtgagttctccaaggcccatgaggatatgactgccctggagaaggattacaaggaggtgggcatggatagtgtggagtgtggggaagaaaagataggggggatgaatactaggggaatactgtgtgtctgtcctacataaagtgctgtggcctt

SEQ ID NO: 201 - DNA, 1664 bp, Homo sapiens
aattcataaacaagagctccagttccctggaacctgagtcgggagacctgcagctcactttctccctgtttgctggccagcagggtttgtggccgcctctgctgtgacgccacagcctggtgaggagggggctgcagttcctcaggaaactgccagtggacaaagtcataaacaagagttccagttccctggaacctgagtcgggaggcctgcaactcactttctccctgtttgctggcccagacaggcctgtgctagagggctggatagtgtggtagtgtggtggatagagtgctgcctctatccacaacgcagccatatgctgactgaagataactttgtgtctggaagagccctctgatttcttacactaatggccttacacgacatggaggattttacatttgatggaacaaagcgcttaagtgtcaactacgtgaagggaattcttcaaccgacagacacctgtgacatctgggataagatctggaacttccaagccaagcctgatgacctgcttatttctacctatcctaaagcaggaacaacatggactcaggagatagtggaattaatacaaaatgaaggtgatgtggagaaaagtaaacgggcaccgactcatcaacgatttcctttcctcgaaatgaaaatcccatccttaggatctggtttggaacaagctcatgcaatgccctcaccacggatcctgaaaacacatcttccctttcacttgctgccaccatccttgctagagaaaaactgtaagataatctatgtagcaagaaatcccaaggacaacatggtgtcctattaccatttccaaagaatgaataaagctcttcctgctccaggaacatgggaagagtattttgagacttttctggctgggaaagtgtgctggggctcctggcatgaacatgtgaaaggatggtgggaagccaaagacaaacaccgtattctctatctcttctatgaggacatgaagaagaacccaaagcatgaaattcagaagctggcagaatttattgggaagaaattagatgacaaagttctagataaaattgtccattacacttcgtttgatgtcatgaaacagaatccaatggcaaactattcatcgattcctgctgaaatcatggaccactccatttctccattcatgagaaaaggggcagtgggagactggaagaaacacttcaccgtggctcagaatgagagatttgatgaagattacaagaagaaaatgactgataccagactaactttccacttccagttctagtaaggaagaaaaactgaaaatgttttagtttattacccagtatatttgggtaataatgaaagtttaattctcataacaaatgatatcagattccagttatcagaatagtttactgtgtttgctcttattcactctactaaaaaattattttaaaaggctggaggcaaggtggtgacaggcagcagggtggcgacatggagagagggaagctcaataaatcactaggtacaatcctggtatcattgccaattatcatcatatttacattttctacaatcatgtgcttattaacatattggaaatgcttcagtcctcacatgataatacactaacattttcagattaagttttggttcaagttaattttttttttttttttttt

SEQ ID NO: 202 - DNA, 5748 bp, Homo sapiens
gagaagaaagccagtgcgtctctgggcgcaggggccagtggggctcggaggcacaggcaccccgcgacactccaggttccccgacccacgtccctggcagccccgattatttacagcctcagcagagcacggggcgggggcagaggggcccgcccgggagggctgctacttcttaaaacctctgcgggctgcttagtcacagccccccttgcttgggtgtgtccttcgctcgctccctccctccgtcttaggtcactgttttcaacctcgaataaaaactgcagccaacttccgaggcagcctcattgcccagcggaccccagcctctgccaggttcggtccgccatcctcgtcccgtcctccgccggcccctgccccgcgcccagggatcctccagctcctttcgcccgcgccctccgttcgctccggacaccatggacaagttttggtggcacgcagcctggggactctgcctcgtgccgctgagcctggcgcagatcgatttgaatataacctgccgctttgcaggtgtattccacgtggagaaaaatggtcgctacagcatctctcggacggaggccgctgacctctgcaaggctttcaatagcaccttgcccacaatggcccagatggagaaagctctgagcatcggatttgagacctgcaggtatgggttcatagaagggcacgtggtgattccccggatccaccccaactccatctgtgcagcaaacaacacaggggtgtacatcctcacatccaacacctcccagtatgacacatattgcttcaatgcttcagctccacctgaagaagattgtacatcagtcacagacctgcccaatgcctttgatggaccaattaccataactattgttaaccgtgatggcacccgctatgtccagaaaggagaatacagaacgaatcctgaagacatctaccccagcaaccctactgatgatgacgtgagcagcggctcctccagtgaaaggagcagcacttcaggaggttacatcttttacaccttttctactgtacaccccatcccagacgaagacagtccctggatcaccgacagcacagacagaatccctgctaccactttgatgagcactagtgctacagcaactgagacagcaaccaagaggcaagaaacctgggattggttttcatggttgtttctaccatcagagtcaaagaatcatcttcacacaacaacacaaatggctggtacgtcttcaaataccatctcagcaggctgggagccaaatgaagaaaatgaagatgaaagagacagacacctcagtttttctggatcaggcattgatgatgatgaagattttatctccagcaccatttcaaccacaccacgggcttttgaccacacaaaacagaaccaggactggacccagtggaacccaagccattcaaatccggaagtgctacttcagacaaccacaaggatgactgatgtagacagaaatggcaccactgcttatgaaggaaactggaacccagaagcacaccctcccctcattcaccatgagcatcatgaggaagaagagaccccacattctacaagcacaatccaggcaactcctagtagtacaacggaagaaacagctacccagaaggaacagtggtttggcaacagatggcatgagggatatcgccaaacacccaaagaagactcccattcgacaacagggacagctgcagcctcagctcataccagccatccaatgcaaggaaggacaacaccaagcccagaggacagttcctggactgatttcttcaacccaatctcacaccccatgggacgaggtcatcaagcaggaagaaggatggatatggactccagtcatagtataacgcttcagcctactgcaaatccaaacacaggtttggtggaagatttggacaggacaggacctctttcaatgacaacgcagcagagtaattctcagagcttctctacatcacatgaaggcttggaagaagataaagaccatccaacaacttctactctgacatcaagcaataggaatgatgtcacaggtggaagaagagacccaaatcattctgaaggctcaactactttactggaaggttatacctctcattacccacacacgaaggaaagcaggaccttcatcccagtgacctcagctaagactgggtcctttggagttactgcagttactgttggagattccaactctaatgtcaatcgttccttatcaggagaccaagacacattccaccccagtggggggtcccataccactcatggatctgaatcagatggacactcacatgggagtcaagaaggtggagcaaacacaacctctggtcctataaggacaccccaaattccagaatggctgatcatcttggcatccctcttggccttggctttgattcttgcagtttgcattgcagtcaacagtcgaagaaggtgtgggcagaagaaaaagctagtgatcaacagtggcaatggagctgtggaggacagaaagccaagtggactcaacggagaggccagcaagtctcaggaaatggtgcatttggtgaacaaggagtcgtcagaaactccagaccagtttatgacagctgatgagacaaggaacctgcagaatgtggacatgaagattggggtgtaacacctacaccattatcttggaaagaaacaaccgttggaaacataaccattacagggagctgggacacttaacagatgcaatgtgctactgattgtttcattgcgaatcttttttagcataaaattttctactctttttgttttttgtgttttgttctttaaagtcaggtccaatttgtaaaaacagcattgctttctgaaattagggcccaattaataatcagcaagaatttgatcgttccagttcccacttggaggcctttcatccctcgggtgtgctatggatggcttctaacaaaaactacacatatgtattcctgatcgccaacctttcccccaccagctaaggacatttcccagggttaatagggcctggtccctgggaggaaatttgaatgggtccattttgcccttccatagcctaatccctgggcattgctttccactgaggttgggggttggggtgtactagttacacatcttcaacagaccccctctagaaatttttcagatgcttctgggagacacccaaagggtgaagctatttatctgtagtaaactatttatctgtgtttttgaaatattaaaccctggatcagtcctttgatcagtataattttttaaagttactttgtcagaggcacaaaagggtttaaactgattcataataaatatctgtacttcttcgatcttcaccttttgtgctgtgattcttcagtttctaaaccagcactgtctgggtccctacaatgtatcaggaagagctgagaatggtaaggagactcttctaagtcttcatctcagagaccctgagttcccactcagacccactcagccaaatctcatggaagaccaaggagggcagcactgtttttgttttttgttttttgttttttttttttgacactgtccaaaggttttccatcctgtcctggaatcagagttggaagctgaggagcttcagcctcttttatggtttaatggccacctgttctctcctgtgaaaggctttgcaaagtcacattaagtttgcatgacctgttatccctggggccctatttcatagaggctggccctattagtgatttccaaaaacaatatggaagtgccttttgatgtcttacaataagagaagaagccaatggaaatgaaagagattggcaaaggggaaggatgatgccatgtagatcctgtttgacatttttatggctgtatttgtaaacttaaacacaccagtgtctgttcttgatgcagttgctatttaggatgagttaagtgcctggggagtccctcaaaaggttaaagggattcccatcattggaatcttatcaccagataggcaagtttatgaccaaacaagagagtactggctttatcctctaacctcatattttctcccacttggcaagtcctttgtggcatttattcatcagtcagggtgtccgattggtcctagaacttccaaaggctgcttgtcatagaagccattgcatctataaagcaacggctcctgttaaatggtatctcctttctgaggctcctactaaaagtcatttgttacctaaacttatgtgcttaacaggcaatgcttctcagaccacaaagcagaaagaagaagaaaagctcctgactaaatcagggctgggcttagacagagttgatctgtagaatatctttaaaggagagatgtcaactttctgcactattcccagcctctgctcctccctgtctaccctctcccctccctctctccctccacttcaccccacaatcttgaaaaacttcctttctcttctgtgaacatcattggccagatccattttcagtggtctggatttctttttattttcttttcaacttgaaagaaactggacattaggccactatgtgttgttactgccactagtgttcaagtgcctcttgttttcccagagatttcctgggtctgccagaggcccagacaggctcactcaagctctttaactgaaaagcaacaagccactccaggacaaggttcaaaatggttacaacagcctctacctgtcgccccagggagaaaggggtagtgatacaagtctcatagccagagatggttttccactccttctagatattcccaaaaagaggctgagacaggaggttattttcaattttattttggaattaaatacttttttccctttattactgttgtagtccctcacttggatatacctctgttttcacgatagaaataagggaggtctagagcttctattccttggccattgtcaacggagagctggccaagtcttcacaaacccttgcaacattgcctgaagtttatggaataagatgtattctcactcccttgatctcaagggcgtaactctggaagcacagcttgactacacgtcatttttaccaatgattttcaggtgacctgggctaagtcatttaaactgggtctttataaaagtaaaaggccaacatttaattattttgcaaagcaacctaagagctaaagatgtaatttttcttgcaattgtaaatcttttgtgtctcctgaagacttcccttaaaattagctctgagtgaaaaatcaaaagagacaaaagacatcttcgaatccatatttcaagcctggtagaattggcttttctagcagaacctttccaaaagttttatattgagattcataacaacaccaagaattgattttgtagccaacattcattcaatactgttatatcagaggagtaggagagaggaaacatttgacttatctggaaaagcaaaatgtacttaagaataagaataacatggtccattcacctttatgttatagatatgtctttgtgtaaatcatttgttttgagttttcaaagaatagcccattgttcattcttgtgctgtacaatgaccactgttattgttactttgacttttcagagcacacccttcctctggtttttgtatatttattgatggatcaataataatgaggaaagcatgatatgtatattgctgagttgaaagcacttattggaaaatattaaaaggctaacattaaaagactaaaggaaacagaaaaaaaaaaaaaaaaa

SEQ ID NO: 203 - DNA, 2799 bp, Homo sapiens
agcttcgaggccagtgggaggagggaggggccaggcagctgagggccaggaaagatgtgaaaaactctagctggtgaccgagaggaggagtagagtgtgcccttagttcatatgaactagagggagttggtatttgcacagcagtcagggtcacatgagtgatcatggtacagtgagaagttctccctcccagggccaggtcacagggtttgtttctgttcaatccggattcttccagtaaaagcttcaacttcccacactgaagctgagagcctcccaaagtgctggctacctgctgagcgcccccgtaactctgacacagtagtaatttgagcctctgcaattgccgtctgcttcctgtgaaagtcctttccgtgcccactgacccttgagtgggcctttgagctgctgactttcagctggaacttgaagggaccccaaccctgagacactatggccctgacctcagacctggggaaacagataaaactgaaagaggtggaggggaccctcctgcagcctgcaactgtggacaactggagccagatccagagcttcgaggccaaaccagatgatctcctcatctgcacctaccctaaagcagggacaacgtggattcaggaaattgtggatatgattgaacagaatggggacgtggagaagtgccagcgagccatcatccaacaccgccatcctttcattgagtgggctcggccaccccaaccttctggtgtggaaaaagccaaagcaatgccctctccacggatactaaagactcacctttccactcagctgctgccaccgtctttctgggaaaacaactgcaagttcctttatgtagctcgaaatgccaaagactgtatggtttcctactaccatttccaaaggatgaaccacatgcttcctgaccctggtacctgggaagagtattttgaaaccttcatcaatggaaaagtggtttggggttcctggtttgaccacgtgaaaggatggtgggagatgaaagacagacaccagattctcttcctcttctatgaggacataaagagggacccaaagcatgaaattcggaaggtgatgcagttcatgggaaagaaggtggatgaaacagtgctagataaaattgtccaggagacgtcatttgagaaaatgaaagaaaatcccatgacaaatcgttctacagtttccaaatctatcttggaccagtcaatttcctccttcatgagaaaaggaactgtgggggattggaaaaaccacttcactgttgcccagaatgagaggtttgatgaaatctatagaagaaagatggaaggaacctccataaacttctgcatggaactctgagcaagatgtaaataaaattaaaaggtggatggcaagagtgcaaatactatcttcaatccttcagtcccagccagaagaatctctgaaagcatattgtgaatgtatacaatgtagtacaaacaatctctgtgatgattaacagtatgtcaccacttcattttttaaaaaggatcacgtctaatgcccattttcccaactattctttccaaagtaagatataaggtagcttaataaactaagtaaaacgtatgacttgagtacaaaaggattgttttaatccccattattctggaaagtgcatcctagtctcccagtctataacatcataataccttgagtataagtccaaatattaggttatatctatattaaaaacaaaatttctgtcatctgtcctggccattcaggcaactccagcctgggctcaatcctggagttctgtctggtcactatcagaaggaacactttgagggaaaccctggtgcagccagccctgaggaaacatggcctgagtgccctcactggtgggtgggaataaaatggaagtgcacagaggagatgtcagaagaccaaaacttggtgaatagtcccagtgctaggtcatataggaaacagaaagcatgacagtggccttttgggaacccaagttacgtcctggtgaaagcagaaaggaggagacaggatggctgtcaacaacgtcagcatgggcatggctcccaggcatggaggtaattgggtcttggcttcaatgccacccttttgggaagccctaaaccaagtgaggtgttcttttcccttgcttcccatatttgtcccagttgcagccctgttgttatgtatttactcttcaatttcttatttatacctctcactcaattgttaattctttgggttcagtctcatgccatatttactcctagtacctaatgcagtgcctggcacacagcaagtgcccttgagaacttgtagagggagtaaaaaagtgcatggataaatgactgcagcaaatcacaaattttgaactttgacccttttcttttagtcccaaatagtggcattccatagctgagggtagtaggagcagttcaccctgggagcagacaataagaggaagaatgaagccaactaaaattctgaatgctttttgttggatttcgtagggtattttttttaaaatagggtcttgctatgttgcccaggctggtcttaactgactgctttttattattaccatgcactggcaattccaaacaatgtcagtgttaaaatgcttctccctgaaaaagagaaaaaaaaaaggaaaaaaagaaaagaaaagtgaaaagaaaaactcttattggcctaagttctaaataatagctaggttaccactgagttttaactatatgtatatgagcttcaaataagcacctttttattatgtaaataaataaaagttatctgtatccccaaaaa

SEQ ID NO: 204 - DNA, 1504 bp, Homo sapiens
ggttgaggtcaagtagtagcgttgggctgcggcagcggaggagctcaacatgcgtgagtgtatctctatccacgtggggcaggcaggagtccagatcggcaatgcctgctgggaactgtactgcctggaacatggaattcagcccgatggtcagatgccaagtgataaaaccattggtggtggggacgactccttcaacacgttcttcagtgagactggagctggcaagcacgtgcccagagcagtgtttgtggacctggagcccactgtggtcgatgaagtgcgcacaggaacctataggcagctcttccacccagagcagctgatcaccgggaaggaagatgcggccaataattacgccagaggccattacaccatcggcaaggagatcgtcgacctggtcctggaccggatccgcaaactggcggatctgtgcacgggactgcagggcttcctcatcttccacagttttgggggtggcactggctctgggttcgcatctctgctcatggagcggctctcagtggattacggcaagaagtccaagctagaatttgccatttacccagccccccaggtctccacggccgtggtggagccctacaactccatcctgaccacccacacgaccctggaacattctgactgtgccttcatggtcgacaatgaagccatctatgacatatgtcggcgcaacctggacatcgagcgtcccacgtacaccaacctcaatcgcctgattgggcagatcgtgtcctccatcacggcctccctgcgatttgacggggccctgaatgtggacttgacggaattccagaccaacctagtgccgtacccccgcatccacttccccctggccacctacgccccggtcatctcagccgagaaggcctaccacgagcagctgtccgtggctgagatcaccaatgcctgcttcgagccagccaatcagatggtcaagtgtgaccctcgccacggcaagtacatggcctgctgcatgttgtacaggggggatgtggtcccgaaagatgtcaacgcggccatcgccaccatcaagaccaagcgcaccatccagtttgtagattggtgcccaactggatttaaggtgggcattaactaccagccccccacggtggtccctgggggagacctggccaaggtgcagcgggctgtgtgcatgctgagcaacaccacggccatcgcggaggcctgggctcgcctggaccataagttcgatctcatgtatgccaagcgggcctttgtgcactggtacgtgggagaaggcatggaggagggggagttctctgaggcccgcgaggacctggcagctctggagaaggattatgaagaggtgggcgtggattccgtggaagccgaggctgaagaaggtgaagaatactgaggggagggtgtggtgggttctccactccactgccacccccagcgtggctgctttcaagttctttgcaattaaaggttctgtataaaaaaaaaaaaaaaaaaa

SEQ ID NO: 205 - DNA, 3426 bp, Homo sapiens
gagcaatgatgtagccacctcctaaccttcccttcttgaacccccaggtcccctcttgctgttggctgcacatcaggaaggctgtgatgggaatgaaggtgaaaacttggagatttcacttcagtcattgcttctgcctgcaagatcatcctttaaaagtagagaagctgctctgtgtggtggttaactccaagaggcagaactcgttctagaaggaaatggatgcaagcagctccgggggccccaaacgcatgcttcctgtgatctagcccagggaagcccttccgtgggggccccggctttgagggatgccaccggttctggacgcatggctgattctgaatgatgatggttcgccgggggctgcttgcgtggatttcccgggtggtggttttgctggtgctcctctgctgtgctatctctgtcctgtacatgttggcctgcaccccaaaaggtgacgaggagcagctggcactgcccagggccaacagccccacggggaaggaggggtaccaggccgtccttcaggagtgggaggagcagcaccgcaactacgtgagcagcctgaagcggcagatcgcacagctcaaggaggagctgcaggagaggagtgagcagctcaggaatgggcagtaccaagccagcgatgctgctggcctgggtctggacaggagccccccagagaaaacccaggccgacctcctggccttcctgcactcgcaggtggacaaggcagaggtgaatgctggcgtcaagctggccacagagtatgcagcagtgcctttcgatagctttactctacagaaggtgtaccagctggagactggccttacccgccaccccgaggagaagcctgtgaggaaggacaagcgggatgagttggtggaagccattgaatcagccttggagaccctgaacaatcctgcagagaacagccccaatcaccgtccttacacggcctctgatttcatagaagggatctaccgaacagaaagggacaaagggacattgtatgagctcaccttcaaaggggaccacaaacatgaattcaaacggctcatcttatttcgaccattcggccccatcatgaaagtgaaaaatgaaaagctcaacatggccaacacgcttatcaatgttatcgtgcctctagcaaaaagggtggacaagttccggcagttcatgcagaatttcagggagatgtgcattgagcaggatgggagagtccatctcactgttgtttactttgggaaagaagaaataaatgaagtcaaaggaatacttgaaaacacttccaaagctgccaacttcaggaactttaccttcatccagctgaatggagaattttctcggggaaagggacttgatgttggagcccgcttctggaagggaagcaacgtccttctctttttctgtgatgtggacatctacttcacatctgaattcctcaatacgtgtaggctgaatacacagccagggaagaaggtattttatccagttcttttcagtcagtacaatcctggcataatatacggccaccatgatgcagtccctcccttggaacagcagctggtcataaagaaggaaactggattttggagagactttggatttgggatgacgtgtcagtatcggtcagacttcatcaatataggtgggtttgatctggacatcaaaggctggggcggagaggatgtgcacctttatcgcaagtatctccacagcaacctcatagtggtacggacgcctgtgcgaggactcttccacctctggcatgagaagcgctgcatggacgagctgacccccgagcagtacaagatgtgcatgcagtccaaggccatgaacgaggcatcccacggccagctgggcatgctggtgttcaggcacgagatagaggctcaccttcgcaaacagaaacagaagacaagtagcaaaaaaacatgaactcccagagaaggattgtgggagacactttttctttccttttgcaattactgaaagtggctgcaacagagaaaagacttccataaaggacgacaaaagaattggactgatgggtcagagatgagaaagcctccgatttctctctgttgggctttttacaacagaaatcaaaatctccgctttgcctgcaaaagtaacccagttgcaccctgtgaagtgtctgacaaaggcagaatgcttgtgagattataagcctaatggtgtggaggttttgatggtgtttacaatacactgagacctgttgttttgtgtgctcattgaaatattcatgatttaagagcagttttgtaaaaaattcattagcatgaaaggcaagcatatttctcctcatatgaatgagcctatcagcagggctctagtttctaggaatgctaaaatatcagaaggcaggagaggagataggcttattatgatactagtgagtacattaagtaaaataaaatggaccagaaaagaaaagaaaccataaatatcgtgtcatattttccccaagattaaccaaaaataatctgcttatctttttggttgtccttttaactgtctccgtttttttcttttatttaaaaatgcactttttttcccttgtgagttatagtctgcttatttaattaccactttgcaagccttacaagagagcacaagttggcctacatttttatattttttaagaagatactttgagatgcattatgagaactttcagttcaaagcatcaaattgatgccatatccaaggacatgccaaatgctgattctgtcaggcactgaatgtcaggcattgagacatagggaaggaatggtttgtactaatacagacgtacagatactttctctgaagagtattttcgaagaggagcaactgaacactggaggaaaagaaaatgacactttctgctttacagaaaaggaaactcattcagactggtgatatcgtgatgtacctaaaagtcagaaaccacattttctcctcagaagtagggaccgctttcttacctgtttaaataaaccaaagtataccgtgtgaaccaaacaatctcttttcaaaacagggtgctcctcctggcttctggcttccataagaagaaatggagaaaaatatatatatatatatatatattgtgaaagatcaatccatctgccagaatctagtgggatggaagtttttgctacatgttatccaccccaggccaggtggaagtaactgaattattttttaaattaagcagttctactcgatcaccaagatgcttctgaaaattgcattttattaccatttcaaactattttttaaaaataaatacagttaacatagagtggtttcttcattcatgtgaaaattattagccagcaccagatgcatgagctaattatctctttgagtccttgcttctgtttgctcacagtaagctcattgtttaaaagcttc

SEQ ID NO: 206 - DNA, 519 bp, Homo sapiens
agcatagtttcatttcctgctcttgaatatctggttgaactacttaagcttaatttgttaaactccggtaagtacctagcccacatgatttgactcagagattctcttttgtccacagacagtcatctcaggagcagaaagaaaagagctcccaaatgctatatctattcaggggctctcaagaacaatggaatatcatcctgatttagaaaatttggatgaagatggatatactcaattacacttcgactctcaaagcaataccaggatagctgttgtttcagagaaaggatcgtgtgctgcatctcctccttggcgcctcattgctgtaattttgggaatcctatgcttggtaatactggtgatagctgtggtcctgggtaccatggctggtttcaaagctgtggaattcaaaggataaattaatgaagaaaacaagcggagctgaagaagaaagtacaatatggtgctgtcttcctaatgaaataaattcactaaatggacattaaaaaaaaaaaa

SEQ ID NO: 207 - DNA, 55 bp, artificial sequence
  source: /note="Description of artificial sequence: preferred oligonucleotide for gene A4GALT"
cgcccgcattataaacacaggagaataatcaatagaataaaagtgaccgactgtc

SEQ ID NO: 208 - DNA, 63 bp, artificial sequence
  source: /note="Description of artificial sequence: preferred oligonucleotide for gene A4GNT"
atcgcaagcactgtcccaggacttacagggacctgattaaaggcccagaggggtcagtgactg

SEQ ID NO: 209 - DNA, 50 bp, artificial sequence
  source: /note="Description of artificial sequence: preferred oligonucleotide for gene ACT"
aatatgagatgcattgttacaggaagtcccttgccatcctaaaagccacc

SEQ ID NO: 210 - DNA, 50 bp, artificial sequence
  source: /note="Description of artificial sequence: preferred oligonucleotide for gene AFG3L2"
cagaccatttgcggaaaaatctacctatgaagaatttgtggaaggcactg

SEQ ID NO: 211 - DNA, 50 bp, artificial sequence
  source: /note="Description of artificial sequence: preferred oligonucleotide for gene ANXA4"
ctatttgcactgtgcctttcaactccagaaacattctaagatgtacttgg

SEQ ID NO: 212 - DNA, 50 bp, artificial sequence
  source: /note="Description of artificial sequence: preferred oligonucleotide for gene ARAF"
atacttctaaattttgggagctcctccatctccaatggctgggatttgtg

SEQ ID NO: 213 - DNA, 50 bp, artificial sequence
  source: /note="Description of artificial sequence: preferred oligonucleotide for gene B2M"
gaaccatgtgactttgtcacagcccaagatagttaagtgggatcgagaca

SEQ ID NO: 214 - DNA, 52 bp, artificial sequence
  source: /note="Description of artificial sequence: preferred oligonucleotide for gene B3GALNT1"
aacaaggtgatgtctgtttcccagggctcagacctaatccagttataataaa

SEQ ID NO: 215 - DNA, 52 bp, artificial sequence
  source: /note="Description of artificial sequence: preferred oligonucleotide for gene B3GALNT2"
atccttgtcgatgtcaagcaagataacagggacttgaattagcagagtctaa

SEQ ID NO: 216 - DNA, 51 bp, artificial sequence
  source: /note="Description of artificial sequence: preferred oligonucleotide for gene B3GALT1"
aagtgacttccaaacaactcttaggattgacgtaccgtgcatctgagataa

SEQ ID NO: 217 - DNA, 53 bp, artificial sequence
  source: /note="Description of artificial sequence: preferred oligonucleotide for gene B3GALT2"
atacgggaagtttatttcctgacagcaggtgtacacatgccaacacttaatca

SEQ ID NO: 218 - DNA, 51 bp, artificial sequence
  source: /note="Description of artificial sequence: preferred oligonucleotide for gene B3GALT4"
catcgggaagagaaaaagaaaaaaatgctgcagttgttctctcaagctagg

SEQ ID NO: 219 - DNA, 55 bp, artificial sequence
  source: /note="Description of artificial sequence: preferred oligonucleotide for gene B3GALT5"
ccaaggtacttcgttagttttgcccattcagccatggtcacgtgacatgcaaagt

SEQ ID NO: 220 - DNA, 51 bp, artificial sequence
  source: /note="Description of artificial sequence: preferred oligonucleotide for gene B3GALT6"
cccccaacaggaagagtctaaaaatccagtttgcaaccacttctgacctac

SEQ ID NO: 221 - DNA, 52 bp, artificial sequence
  source: /note="Description of artificial sequence: preferred oligonucleotide for gene B3GNT1"
ttgccgctaacaaccatatcgtgttagtgaattttcaatatggaccaggaag

SEQ ID NO: 222 - DNA, 52 bp, artificial sequence; identical to SEQ ID NO: 221
  source: /note="Description of artificial sequence: preferred oligonucleotide for gene B3GNT2"

SEQ ID NO: 223 - DNA, 51 bp, artificial sequence
  source: /note="Description of artificial sequence: preferred oligonucleotide for gene B3GNT3"
gtttgagtcaaagtcttacttccctgctctcacctactcacagacgggatg

SEQ ID NO: 224 - DNA, 53 bp, artificial sequence
  source: /note="Description of artificial sequence: preferred oligonucleotide for gene B3GNT4"
ctacagaaaatgccaacttggttttttaactcctctcaccctgttagctctga

SEQ ID NO: 225 - DNA, 50 bp, artificial sequence
  source: /note="Description of artificial sequence: preferred oligonucleotide for gene B3GNT5"
aaaacataagtgtctctggccatcaaagtgatcttgtttacagcagtgct

SEQ ID NO: 226 - DNA, 58 bp, artificial sequence
  source: /note="Description of artificial sequence: preferred oligonucleotide for gene B3GNT6"
aggtagaaatcttcaccgtgcaaagtggaaaccagaggcccggtcagacagtgactaa

SEQ ID NO: 227 - DNA, 58 bp, artificial sequence
  source: /note="Description of artificial sequence: preferred oligonucleotide for gene B3GNT7"
tcgtgggcgatgtcctgcagcacgctcggcccattcgcaggaaagacaacaaatacta

SEQ ID NO: 228 - DNA, 58 bp, artificial sequence
  source: /note="Description of artificial sequence: preferred oligonucleotide for gene B3GNT8"
gagtccttcttcgaaggtggctacccagcctatgcaagcgggggtggctacgtcattg

SEQ ID NO: 229 - DNA, 50 bp, artificial sequence
  source: /note="Description of artificial sequence: preferred oligonucleotide for gene B3GNTL1"
gaacaagatcaggaaaggcttctattgccacgaggactctcaggaaagac

SEQ ID NO: 230 - DNA, 51 bp, artificial sequence
  source: /note="Description of artificial sequence: preferred oligonucleotide for gene B4GALNT1"
ggagacatgtcaggaatagattaggcacccctcttccttaatgaaatgtgg

SEQ ID NO: 231 - DNA, 51 bp, artificial sequence
  source: /note="Description of artificial sequence: preferred oligonucleotide for gene B4GALNT2"
taaagacaaccacgtggagtattacactatgccctttgggaagggttggtt

SEQ ID NO: 232 - DNA, 70 bp, artificial sequence
  source: /note="Description of artificial sequence: preferred oligonucleotide for gene B4GALTN3"
gttccaggtcaccggtgacccacacttcaacatcgtcatcactgactatagcagtgaggacatggatgtt

SEQ ID NO: 233 - DNA, 53 bp, artificial sequence
  source: /note="Description of artificial sequence: preferred oligonucleotide for gene B4GALNT4"
tccgactgcggaatttctatcaccactaccactccaagaggggcatgtggagc

SEQ ID NO: 234 - DNA, 51 bp, artificial sequence
  source: /note="Description of artificial sequence: preferred oligonucleotide for gene B4GALT1"
agtatgtggttcattcttagaaccaagggaaatactgctccccccatttgc

SEQ ID NO: 235 - DNA, 50 bp, artificial sequence
  source: /note="Description of artificial sequence: preferred oligonucleotide for gene B4GALT2"
gtacattgcacagaaacttgtgtgggtgctttagtaaaaaacgtgaatgg

SEQ ID NO: 236 - DNA, 51 bp, artificial sequence
  source: /note="Description of artificial sequence: preferred oligonucleotide for gene B4GALT3"
ctgtctaccttaatcatgaaaccgaattcatggggttgtattctccccacc

SEQ ID NO: 237 - DNA, 51 bp, artificial sequence
  source: /note="Description of artificial sequence: preferred oligonucleotide for gene B4GALT4"
aggtatgccttccagtgatgcccaccagagaatacattctctattagtttt

SEQ ID NO: 238 - DNA, 52 bp, artificial sequence
  source: /note="Description of artificial sequence: preferred oligonucleotide for gene B4GALT5"
tgaccttgtgcatatattggtagctgaaaatcttcaaggctactgatgggtg

SEQ ID NO: 239 - DNA, 50 bp, artificial sequence
  source: /note="Description of artificial sequence: preferred oligonucleotide for gene B4GALT6"
taatatgtttctgtgagagtgacagagctgtgcccgtttatcttcattgt

SEQ ID NO: 240 - DNA, 51 bp, artificial sequence
  source: /note="Description of artificial sequence: preferred oligonucleotide for gene B4GALT7"
tgggcctagtgttgccagatcttctgatttttcgaaagaaactagaatgct

SEQ ID NO: 241 - DNA, 51 bp, artificial sequence
  source: /note="Description of artificial sequence: preferred oligonucleotide for gene C1GALT1"
gtatttcttccagaagaagctaaaataagactggcacttaccctgaagtgc

SEQ ID NO: 242 - DNA, 55 bp, artificial sequence
  source: /note="Description of artificial sequence: preferred oligonucleotide for gene C1GALT1C1"
ctgtccccaagccgttctagacgcgggaaaaatgctttctgaaagcagctccttt

SEQ ID NO: 243 - DNA, 55 bp, artificial sequence
  source: /note="Description of artificial sequence: preferred oligonucleotide for gene CD44"
tggcaagtcctttgtggcatttattcatcagtcagggtgtccgattggtcctaga

SEQ ID NO: 244 - DNA, 60 bp, artificial sequence
  source: /note="Description of artificial sequence: preferred oligonucleotide for gene CD69"
tgtgcaatatgtgatgtggcaaatctctattaggaaatattctgtaatcttcagacctag

SEQ ID NO: 245 - DNA, 50 bp, artificial sequence
  source: /note="Description of artificial sequence: preferred oligonucleotide for gene CDC2L1"
aacgcttcttcggtgaagttcttttgtacttccaaatgtcgcagtctgat

SEQ ID NO: 246 - DNA, 51 bp, artificial sequence
  source: /note="Description of artificial sequence: preferred oligonucleotide for gene CDC2L2"
gtaccgcgccccagagctgctgcttggtgccaaggaatactccacggccgt

SEQ ID NO: 247 - DNA, 51 bp, artificial sequence
  source: /note="Description of artificial sequence: preferred oligonucleotide for gene CDH17"
ttggtctcccaatacaggcatgaaccactgcacccacctacttagatattt

SEQ ID NO: 248 - DNA, 70 bp, artificial sequence
  source: /note="Description of artificial sequence: preferred oligonucleotide for gene CHPF"
tctcccaacttctcccttttggaccctgccgaagctccctgcctttaataaactggccaagtgtgaaaaa

SEQ ID NO: 249 - DNA, 52 bp, artificial sequence
  source: /note="Description of artificial sequence: preferred oligonucleotide for gene CHST4"
gaggcctattaagcacgacacagtatcagtggaattgatccataaacctccc

SEQ ID NO: 250 - DNA, 54 bp, artificial sequence
  source: /note="Description of artificial sequence: preferred oligonucleotide for gene CHST5"
acctcttctgggcgcagggagtaagttactgctaaattaaattaaatgtgtgcc

SEQ ID NO: 251 - DNA, 51 bp, artificial sequence
  source: /note="Description of artificial sequence: preferred oligonucleotide for gene CHST6"
actatgggatggtaaatatccgagaggaagctgatgcaacaggatttgtct

SEQ ID NO: 252 - DNA, 50 bp, artificial sequence
  source: /note="Description of artificial sequence: preferred oligonucleotide for gene CHST8"
ttacctgatgttcaactattccaagccctttgcagatctgtactgagggg

SEQ ID NO: 253 - DNA, 55 bp, artificial sequence
  source: /note="Description of artificial sequence: preferred oligonucleotide for gene CHST9"
ggcacaaagttataggaaaatcacctacaggagatgtaaacaacttgagttgctc

SEQ ID NO: 254 - DNA, 67 bp, artificial sequence
  source: /note="Description of artificial sequence: preferred oligonucleotide for gene CHSY1"
ttgttttcatttagatttcaaacagtgatagacttgccattttaatacacgtcattggagggctgcg

SEQ ID NO: 255 - DNA, 70 bp, artificial sequence
  source: /note="Description of artificial sequence: preferred oligonucleotide for gene CHSY-2/CSS1"
aaaggtaccacaaaagtgctttatgcttcctatggggaagggactctgtaacataaacttgagttttgta

SEQ ID NO: 256 - DNA, 70 bp, artificial sequence
  source: /note="Description of artificial sequence: preferred oligonucleotide for gene CLEC2B"
tttacccaccactgtcacacaccaatcagaacttgccagctcctcaaaactttactagggccaataaact

SEQ ID NO: 257 - DNA, 70 bp, artificial sequence
  source: /note="Description of artificial sequence: preferred oligonucleotide for gene CLEC7A"
tgggtaccatggctggtttcaaagctgtggaattcaaaggataaattaatgaagaaaacaagcggagctg

SEQ ID NO: 258 - DNA, 70 bp, artificial sequence
  source: /note="Description of artificial sequence: preferred oligonucleotide for gene CMAH"
tggaaaacaaagcatagctgtagtagatacgaatccaatcacagaggaaacaggaagagaaaaacatcca

SEQ ID NO: 259 - DNA, 50 bp, artificial sequence
  source: /note="Description of artificial sequence: preferred oligonucleotide for gene CMAS"
ctcagaaagggcctgttcaaagcagacgctgtcttctttaaaactggatt

SEQ ID NO: 260 - DNA, 70 bp, artificial sequence
  source: /note="Description of artificial sequence: preferred oligonucleotide for gene CS-GALNACT1"
catgtgaaaattattagccagcaccagatgcatgagctaattatctctttgagtccttgcttctgtttgc

SEQ ID NO: 261 - DNA, 70 bp, artificial sequence
  source: /note="Description of artificial sequence: preferred oligonucleotide for gene CS-GALNACT2"
cactctgatttgagaaaagggaggaggggaagatagtctgaatggaaatctgaaatacggaatgttttag

SEQ ID NO: 262 - DNA, 55 bp, artificial sequence
  source: /note="Description of artificial sequence: preferred oligonucleotide for gene CSS2"
gcgttcgccgctttggtagggctcagtgtgtgtggtcttttcagatgcaacaact

SEQ ID NO: 263 - DNA, 50 bp, artificial sequence
  source: /note="Description of artificial sequence: preferred oligonucleotide for gene CXADR"
gtgtcctccatcaattctgtattccagacttgggaggatgtacagttgct

SEQ ID NO: 264 - DNA, 50 bp, artificial sequence
  source: /note="Description of artificial sequence: preferred oligonucleotide for gene DPAGT1"
gtgttctgattagtaagaactaagcagggggccacatgctctcaatggag

SEQ ID NO: 265 - DNA, 50 bp, artificial sequence
  source: /note="Description of artificial sequence: preferred oligonucleotide for gene DSP"
gcgtctgaagtgctaatcagttgtaacaatagcacaaatcgaacttagga

SEQ ID NO: 266 - DNA, 51 bp, artificial sequence
  source: /note="Description of artificial sequence: preferred oligonucleotide for gene ECOP"
gttagaattgtgctactgtgaacgctgatcctgcatatggaagtcccactt

SEQ ID NO: 267 - DNA, 52 bp, artificial sequence
  source: /note="Description of artificial sequence: preferred oligonucleotide for gene ETFB"
gggcggatttgagcccctcccagagatggcaataaaactgactctcaacatc

SEQ ID NO: 268 - DNA, 70 bp, artificial sequence
  source: /note="Description of artificial sequence: preferred oligonucleotide for gene FPGT"
tctacagcttcacattcaaactcttcagcactttcagagctattgatatgcatatgtccacctagtacca

SEQ ID NO: 269 - DNA, 52 bp, artificial sequence
  source: /note="Description of artificial sequence: preferred oligonucleotide for gene FUCA1"
gtccccgcagagtttgcttggactataaagctgacaggagtgaagtaatcat

SEQ ID NO: 270 - DNA, 65 bp, artificial sequence
  source: /note="Description of artificial sequence: preferred oligonucleotide for gene FUCA2"
ttacaaaatcctagatggcatagcctactacacacctaatgtgtatggtatagactgttgctcct

SEQ ID NO: 271 - DNA, 70 bp, artificial sequence
  source: /note="Description of artificial sequence: preferred oligonucleotide for gene FucT1/SLC35C1"
atgtcctttctcttggggtgatttctgatgtttttactctatatagtgaaaagctagggagagcgggtct

SEQ ID NO: 272 - DNA, 55 bp, artificial sequence
  source: /note="Description of artificial sequence: preferred oligonucleotide for gene FUK"
tgccatcccaggccttaactagcaaaactacggagcgtgccaagtgacctggtgc

SEQ ID NO: 273 - DNA, 51 bp, artificial sequence
  source: /note="Description of artificial sequence: preferred oligonucleotide for gene FUT1"
tttggagggtgaaagaagaaaccttaaacatagtcagctctgatcacatcc

SEQ ID NO: 274 - DNA, 60 bp, artificial sequence
  source: /note="Description of artificial sequence: preferred oligonucleotide for gene FUT10"
cagccgagcatgaacatgaaatacattagaacttggcaatgagagatcccatctgttggt

SEQ ID NO: 275 - DNA, 50 bp, artificial sequence
  source: /note="Description of artificial sequence: preferred oligonucleotide for gene FUT11"
attctaccatgggacataaggagcatccactgcacaaacccttaatgaac

SEQ ID NO: 276 - DNA, 50 bp, artificial sequence
  source: /note="Description of artificial sequence: preferred oligonucleotide for gene FUT2"
ttttaatcaccagtgtgcatacagtcatggagctgggtattcccagctac

SEQ ID NO: 277 - DNA, 50 bp, artificial sequence
  source: /note="Description of artificial sequence: preferred oligonucleotide for gene FUT3"
cacggtttccagatgtaatactgcaaggaaaaatgatgacgtgtctcctc

SEQ ID NO: 278 - DNA, 53 bp, artificial sequence
  source: /note="Description of artificial sequence: preferred oligonucleotide for gene FUT4"
cattctactaactggcaccctaaggttgaaagtgcttatctgctttccaatgt

SEQ ID NO: 279 - DNA, 50 bp, artificial sequence
  source: /note="Description of artificial sequence: preferred oligonucleotide for gene FUT5"
gtggttttattgctgttgttaaccacccatgaggggtgcaaacagataat

SEQ ID NO: 280 - DNA, 52 bp, artificial sequence
  source: /note="Description of artificial sequence: preferred oligonucleotide for gene FUT6"
tctctattaaaaaatacaaaaattagtggggcgtggtctcaggctcctgcag

SEQ ID NO: 281 - DNA, 58 bp, artificial sequence
  source: /note="Description of artificial sequence: preferred oligonucleotide for gene FUT7"
agcctgaagtttgtgggggccaaacctgggaccccgagcttcctcggtagcagaggcc

SEQ ID NO: 282 - DNA, 60 bp, artificial sequence
  source: /note="Description of artificial sequence: preferred oligonucleotide for gene FUT8"
cggaacagctccttactctgaggaagttgattcttatttgatggtggtattgtgaccact

SEQ ID NO: 283 - DNA, 50 bp, artificial sequence
  source: /note="Description of artificial sequence: preferred oligonucleotide for gene FUT9"
gcacatatgaccatgatgttcagggctttatagaaccaaataaacctacc

SEQ ID NO: 284 - DNA, 56 bp, artificial sequence
  source: /note="Description of artificial sequence: preferred oligonucleotide for gene Fx/TSTA3"
gaaggagacctgtgcttggttcactgacaactacgagcaggcccggaagtgaagct

SEQ ID NO: 285 - DNA, 50 bp, artificial sequence
  source: /note="Description of artificial sequence: preferred oligonucleotide for gene GAK"
aggcacatgaagagaaagcattccaaagcctctgattgttgtttcctttt

SEQ ID NO: 286 - DNA, 50 bp, artificial sequence
  source: /note="Description of artificial sequence: preferred oligonucleotide for gene GAL3ST2"
ggactggcgcctgtacgagcatttcaaccgcaccctctgggcgcagctgc

SEQ ID NO: 287 - DNA, 50 bp, artificial sequence
  source: /note="Description of artificial sequence: preferred oligonucleotide for gene GALE"
tcctcccaggcactcatttatattgctctgaaagagctttccaaagtatt

SEQ ID NO: 288 - DNA, 50 bp, artificial sequence
  source: /note="Description of artificial sequence: preferred oligonucleotide for gene GALNT1"
gaggaatctcattaagacatttttcctgatatgtagagcagtctgttggc

SEQ ID NO: 289 - DNA, 53 bp, artificial sequence
  source: /note="Description of artificial sequence: preferred oligonucleotide for gene GALNT10"
ggaccaactgatcaattgccagtactaagccactcattgttatggcttccttt

SEQ ID NO: 290 - DNA, 50 bp, artificial sequence
  source: /note="Description of artificial sequence: preferred oligonucleotide for gene GALNT11"
gagctgctgttaaggaatttcttgcttatagaggcaaaccacagtatcat

SEQ ID NO: 291 - DNA, 50 bp, artificial sequence
  source: /note="Description of artificial sequence: preferred oligonucleotide for gene GALNT12"
agtatggatggatgaatttaaagagctctactaccatcgcaacccccgtg

SEQ ID NO: 292 - DNA, 55 bp, artificial sequence
  source: /note="Description of artificial sequence: preferred oligonucleotide for gene GALNT13"
gccccaaacatgcccatcacatgccctagaaggtaagtcccatgaaggcaggggc

SEQ ID NO: 293 - DNA, 50 bp, artificial sequence; identical to SEQ ID NO: 291
  source: /note="Description of artificial sequence: preferred oligonucleotide for gene GALNT14"

SEQ ID NO: 294 - DNA, 70 bp, artificial sequence
  source: /note="Description of artificial sequence: preferred oligonucleotide for gene GALNT15/GALNTL2"
aagtaccagcacaatttgagcattcccattaacaaaggtgttcacagttgagaaactctcctgccgggcg

SEQ ID NO: 295 - DNA, 70 bp, artificial sequence
  source: /note="Description of artificial sequence: preferred oligonucleotide for gene GALNT17"
aataaagtgtttctgacaccattttctgttaatgggacaatatttcggggatgaagaaaggaatgctccg

SEQ ID NO: 296 - DNA, 50 bp, artificial sequence
  source: /note="Description of artificial sequence: preferred oligonucleotide for gene GALNT2"
gtgacttactgcggttgcgttagtttctgtcatcaggacactatctcacc

SEQ ID NO: 297 - DNA, 50 bp, artificial sequence
  source: /note="Description of artificial sequence: preferred oligonucleotide for gene GALNT3"
ctcagctgtacgaaaaagagcatatactggttattgaccctatcttctca

SEQ ID NO: 298 - DNA, 52 bp, artificial sequence
  source: /note="Description of artificial sequence: preferred oligonucleotide for gene GALNT4"
ccgattccctaattcgaatttattggtaccaaagctctctttggctatagac

SEQ ID NO: 299 - DNA, 70 bp, artificial sequence
  source: /note="Description of artificial sequence: preferred oligonucleotide for gene GALNT5"
gcttggaaggaaatttttctcaaaagatcctgaaagtagctgcctgtgacccagtgaagccatatcaaaa

SEQ ID NO: 300 - DNA, 51 bp, artificial sequence
  source: /note="Description of artificial sequence: preferred oligonucleotide for gene GALNT6"
cttgatcatccaaagcacctgcagagtccagtgaaatgatatattctggct

SEQ ID NO: 301 - DNA, 60 bp, artificial sequence
  source: /note="Description of artificial sequence: preferred oligonucleotide for gene GALNT7"
tactgtaggctgctttggaaataattcccatatccttgctttgtaagttggtaatatcac

SEQ ID NO: 302 - DNA, 50 bp, artificial sequence
  source: /note="Description of artificial sequence: preferred oligonucleotide for gene GALNT8"
tactatcacctaactggggagctctatgtgggacaactgattgcagaggc

SEQ ID NO: 303 - DNA, 50 bp, artificial sequence
  source: /note="Description of artificial sequence: preferred oligonucleotide for gene GALNT9"
agacctaagtcacacatcataatgcagctccttgtggtctggtaagaggg

SEQ ID NO: 304 - DNA, 70 bp, artificial sequence
  source: /note="Description of artificial sequence: preferred oligonucleotide for gene GALNTL1/GALNT16"
cttgaccaaagcatgtgccactagctgtccttgaggacctcgtctttatgaaacacacacctggaataaa

SEQ ID NO: 305 - DNA, 51 bp, artificial sequence
  source: /note="Description of artificial sequence: preferred oligonucleotide for gene GALNTL4"
ggaaccaggttagtgggcccccaagaagagctttttatttcctattcaatt

SEQ ID NO: 306 - DNA, 70 bp, artificial sequence
  source: /note="Description of artificial sequence: preferred oligonucleotide for gene GALNTL5"
gggttaaaagtctcctagtcattcaacatagtgtcacaagagtgtaagtttggaacatcgtggaattacg

SEQ ID NO: 307 - DNA, 50 bp, artificial sequence
  source: /note="Description of artificial sequence: preferred oligonucleotide for gene GAPDH"
gaccactttgtcaagctcatttcctggtatgacaacgaatttggctacag

SEQ ID NO: 308 - DNA, 55 bp, artificial sequence
  source: /note="Description of artificial sequence: preferred oligonucleotide for gene GCNT1"
tttctcatattaaatacagacgctcctcaacttatgatgtgggtaggtcccagta

SEQ ID NO: 309 - DNA, 56 bp, artificial sequence
  source: /note="Description of artificial sequence: preferred oligonucleotide for gene GCNT2"
tactttaatgttggaagagcatagtgtttgggctagtgggtttctgacagcccatg

SEQ ID NO: 310 - DNA, 50 bp, artificial sequence
  source: /note="Description of artificial sequence: preferred oligonucleotide for gene GCNT3"
gtgaaggagggatatgtggtagagcacttgatttcagttgaatgcctgct

SEQ ID NO: 311 - DNA, 57 bp, artificial sequence
  source: /note="Description of artificial sequence: preferred oligonucleotide for gene GCNT4"
cttctctggcaactgtccaactggaatccagatttaaggtgataaaagctctaagtt

SEQ ID NO: 312 - DNA, 52 bp, artificial sequence
  source: /note="Description of artificial sequence: preferred oligonucleotide for gene GLB1"
atgaaagcctgtgtctttgagggattctaccctgaacatacctcacagatcc

SEQ ID NO: 313 - DNA, 70 bp, artificial sequence
  source: /note="Description of artificial sequence: preferred oligonucleotide for gene GNE"
tctgttctttggtgtaatctctcatggtgaaatctgctctgtacatcagacaattgcattgctaccaagt

SEQ ID NO: 314 - DNA, 54 bp, artificial sequence
  source: /note="Description of artificial sequence: preferred oligonucleotide for gene GNPTG
ctgaccaggcttgtgctcagagaagcagacaaaacaaagattcaaggttttaat

SEQ ID NO: 315 - DNA, 58 bp, artificial sequence
  source: /note="Description of artificial sequence: preferred oligonucleotide for gene GPAA1"
tctggaagtgagatctgcctgtccgggctgggacagagactccccaaggaccccattc

SEQ ID NO: 316 - DNA, 51 bp, artificial sequence
  source: /note="Description of artificial sequence: preferred oligonucleotide for gene HDAC1"
gccaggtctgggtgaaagggatacttttatgcaaccataagacaaactcct

SEQ ID NO: 317 - DNA, 51 bp, artificial sequence
  source: /note="Description of artificial sequence: preferred oligonucleotide for gene HSP90AB1(HSPCB)"
gaaggcagtaaactaagggtgtcaagccccattccctctctactcttgaca

SEQ ID NO: 318 - DNA, 55 bp, artificial sequence
  source: /note="Description of artificial sequence: preferred oligonucleotide for gene IGnT2"
ctgcctggaagaccttgtggcctctgaagttccctggaagtatgtcatcaacacc

SEQ ID NO: 319 - DNA, 60 bp, artificial sequence
  source: /note="Description of artificial sequence: preferred oligonucleotide for gene ITLN1"
tcctcccaaccatgagatcccaaggatggagaacaacttacccagtagctagaatgttaa

SEQ ID NO: 320 - DNA, 52 bp, artificial sequence
  source: /note="Description of artificial sequence: preferred oligonucleotide for gene ITLN2"
tttggtgatgctaagaagactgcatcttattactcaccgtatggtcaacggg

SEQ ID NO: 321 - DNA, 51 bp, artificial sequence
  source: /note="Description of artificial sequence: preferred oligonucleotide for gene KDELR1"
atcccatggctctcacaccatgtttttgtacagaactgatggttgaatctt

SEQ ID NO: 322 - DNA, 50 bp, artificial sequence
  source: /note="Description of artificial sequence: preferred oligonucleotide for gene KDELR2"
ggtgctcggacagaattcttaccacagcaaaggcataagatgcttgatac

SEQ ID NO: 323 - DNA, 51 bp, artificial sequence
  source: /note="Description of artificial sequence: preferred oligonucleotide for gene KIAA0174"
tgcaaagtttgtcttgacagttgaaggcctcgcttagttgtactggattct

SEQ ID NO: 324 - DNA, 58 bp, artificial sequence
  source: /note="Description of artificial sequence: preferred oligonucleotide for gene LGALS1"
tgtgcatcaccttcgaccaggccaacctgaccgtcaagctgccagatggatacgaatt

SEQ ID NO: 325 - DNA, 70 bp, artificial sequence
  source: /note="Description of artificial sequence: preferred oligonucleotide for gene LGALS10 / CLC"
ccctgtctctacgtgaacttgggattccaaagccagctaacagcatgatcttttctcacttcaatcctta

SEQ ID NO: 326 - DNA, 51 bp, artificial sequence
  source: /note="Description of artificial sequence: preferred oligonucleotide for gene LGALS12"
gggcctggactgcactcacagaggcaagtgttgtagactaacaaagatact

SEQ ID NO: 327 - DNA, 52 bp, artificial sequence
  source: /note="Description of artificial sequence: preferred oligonucleotide for gene LGALS13"
agtatgagataaaggtcaatggcatacgcatttacggctttgtccatcgaat

SEQ ID NO: 328 - DNA, 51 bp, artificial sequence
  source: /note="Description of artificial sequence: preferred oligonucleotide for gene LGALS14"
caaaccatttgagctgtgcatctatgtgcgtcacaaggaatacaaggtaat

SEQ ID NO: 329 - DNA, 50 bp, artificial sequence
  source: /note="Description of artificial sequence: preferred oligonucleotide for gene LGALS2"
attctaggatataagcttgaccacgagttgagaccctgagcacaggcctc

SEQ ID NO: 330 - DNA, 51 bp, artificial sequence
  source: /note="Description of artificial sequence: preferred oligonucleotide for gene LGALS3"
cagcaaactgggaatttctggtgacatagacctcaccagtgcttcatatac

SEQ ID NO: 331 - DNA, 58 bp, artificial sequence
  source: /note="Description of artificial sequence: preferred oligonucleotide for gene LGALS3BP"
caccattgcctacgaaaacaaagccctgatgctctgcgaagggctcttcgtggcagac

SEQ ID NO: 332 - DNA, 52 bp, artificial sequence
  source: /note="Description of artificial sequence: preferred oligonucleotide for gene LGALS4"
gggccataactcatgggaaaacagaattatcccctaggactcctttctaagc

SEQ ID NO: 333 - DNA, 58 bp, artificial sequence
  source: /note="Description of artificial sequence: preferred oligonucleotide for gene LGALS7"
cacggtgctgagaattcgcggcttggttcctcccaatgccagcaggttccatgtaaac

SEQ ID NO: 334 - DNA, 51 bp, artificial sequence
  source: /note="Description of artificial sequence: preferred oligonucleotide for gene LGALS8"
tttcatattaatgtatgcagagtctcaccaagctcaaagacactggttggg

SEQ ID NO: 335 - DNA, 50 bp, artificial sequence
  source: /note="Description of artificial sequence: preferred oligonucleotide for gene LGALS9"
tcttcagaggactggctcctttcccagtgtccttaaaataaagaaatgaa

SEQ ID NO: 336 - DNA, 60 bp, artificial sequence
  source: /note="Description of artificial sequence: preferred oligonucleotide for gene LLGL2"
agcaccctcgagaccccaaccagatcctgatcggctacagccgaggcctcgttgtcatct

SEQ ID NO: 337 - DNA, 56 bp, artificial sequence
  source: /note="Description of artificial sequence: preferred oligonucleotide for gene LYPLA2"
cccagataatcgtgtctcctgcctccactcagctgcttctcagtcatgaatgtggc

SEQ ID NO: 338 - DNA, 50 bp, artificial sequence
  source: /note="Description of artificial sequence: preferred oligonucleotide for gene MAPKAPK2"
ccacttagtgctggtcctaggtcctctgaggcactcatctactgaatgac

SEQ ID NO: 339 - DNA, 50 bp, artificial sequence
  source: /note="Description of artificial sequence: preferred oligonucleotide for gene MGAT1"
ggacatatttgtggccaaaatgatactaaccaaaggggcttccttgtcag

SEQ ID NO: 340 - DNA, 60 bp, artificial sequence
  source: /note="Description of artificial sequence: preferred oligonucleotide for gene MGAT3"
cccagaatggcgacttcccacgctggggtgactacgaggacaagcgggacctgaactaca

SEQ ID NO: 341 - DNA, 50 bp, artificial sequence
  source: /note="Description of artificial sequence: preferred oligonucleotide for gene MGAT4A"
cactgtttctctgtgccacgaccgttcatgtgtatttgaaataaagaagt

SEQ ID NO: 342 - DNA, 51 bp, artificial sequence
  source: /note="Description of artificial sequence: preferred oligonucleotide for gene MGAT4B"
tctctggcgcgaacactggaatgcatatactactttatgtgctgtgttttt

SEQ ID NO: 343 - DNA, 50 bp, artificial sequence
  source: /note="Description of artificial sequence: preferred oligonucleotide for gene MGAT5"
atatgaatttacgtgcgaggggatgctacagagaatcaatgctttcattg

SEQ ID NO: 344 - DNA, 50 bp, artificial sequence
  source: /note="Description of artificial sequence: preferred oligonucleotide for gene MGRN1"
tctgatgtgctcagatgggctcatcgttggttcgtttttactgtatattt

SEQ ID NO: 345 - DNA, 53 bp, artificial sequence
  source: /note="Description of artificial sequence: preferred oligonucleotide for gene NAGK"
cacatcgtagcagtgttgcccgagattgacccggtcttgttccagggcaagat

SEQ ID NO: 346 - DNA, 52 bp, artificial sequence
  source: /note="Description of artificial sequence: preferred oligonucleotide for gene NANS"
gacatctttaatctagtgggcaagaaggtcctggtcactgttgaagaggatg

SEQ ID NO: 347 - DNA, 60 bp, artificial sequence
  source: /note="Description of artificial sequence: preferred oligonucleotide for gene NDST1"
ctgcttcgcacagaacctgccaaagtgatggacatggtgcagaagttccttggggtgacc

SEQ ID NO: 348 - DNA, 60 bp, artificial sequence
  source: /note="Description of artificial sequence: preferred oligonucleotide for gene NEU1"
ttgggcaggtctagtgagctgtagaattgaatcaatgtgaactcagggaactggggaagg

SEQ ID NO: 349 - DNA, 50 bp, artificial sequence
  source: /note="Description of artificial sequence: preferred oligonucleotide for gene NEU2"
agccaatgattacgaggagattgtctttctcatgttcaccctgaagcaag

SEQ ID NO: 350 - DNA, 51 bp, artificial sequence
  source: /note="Description of artificial sequence: preferred oligonucleotide for gene NEU3"
caggatattgtcctggcccagctactcctttacctgtgagaagatcttcac

SEQ ID NO: 351 - DNA, 70 bp, artificial sequence
  source: /note="Description of artificial sequence: preferred oligonucleotide for gene NEU4"
gggtgttgtgggtggcagcacttgtttactggctgctttctggctcgaaataaaggaatcgtgcttgtga

SEQ ID NO: 352 - DNA, 50 bp, artificial sequence
  source: /note="Description of artificial sequence: preferred oligonucleotide for gene NPL"
tcctagcaaatgaaatctcacaataagcattgaggtaccttttgtgagcc

SEQ ID NO: 353 - DNA, 62 bp, artificial sequence
  source: /note="Description of artificial sequence: preferred oligonucleotide for gene O-acetylesterase"
cctcagcccctgagtagctggtactaaagttaccttccacgctgtatgtccgtgagaaatac

SEQ ID NO: 354 - DNA, 65 bp, artificial sequence
  source: /note="Description of artificial sequence: preferred oligonucleotide for gene OGT"
ttcctggcacgaaaagtagccgctctggttgaagctttgcttattgtaacaggcttttatttcca

SEQ ID NO: 355 - DNA, 53 bp, artificial sequence
  source: /note="Description of artificial sequence: preferred oligonucleotide for gene PGM3"
ggccccaaccaggtttctgaagataattttcatattcctgagaaactggactt

SEQ ID NO: 356 - DNA, 58 bp, artificial sequence
  source: /note="Description of artificial sequence: preferred oligonucleotide for gene POFUT1"
gactaggactccagtgccctcctctcccaagagacaaaggccattgcattgaaggagg

SEQ ID NO: 357 - DNA, 62 bp, artificial sequence
  source: /note="Description of artificial sequence: preferred oligonucleotide for gene POFUT2"
agttgcattttccaggctgagagctgtataaaacattttggactgtgaccatgtaccttcct

SEQ ID NO: 358 - DNA, 51 bp, artificial sequence
  source: /note="Description of artificial sequence: preferred oligonucleotide for gene POMGNT1 (FLJ20277)"
tggctcagaatctaacctatttattgactgtcctgagggccttgaaaacag

SEQ ID NO: 359 - DNA, 51 bp, artificial sequence
  source: /note="Description of artificial sequence: preferred oligonucleotide for gene PPIA"
ttacagatgtgagccaccgcaccctacctcattttctgtaacaaagctaag

SEQ ID NO: 360 - DNA, 60 bp, artificial sequence
  source: /note="Description of artificial sequence: preferred oligonucleotide for gene RABGAP1L"
ttactgctttgtgagggtttgaacataatctttcatgtagctttggctctcctaaagacc

SEQ ID NO: 361 - DNA, 51 bp, artificial sequence
  source: /note="Description of artificial sequence: preferred oligonucleotide for gene RENBP"
ccagtttcgcgatcccgagtacggggaatggtttggctacctgagccgaga

SEQ ID NO: 362 - DNA, 53 bp, artificial sequence
  source: /note="Description of artificial sequence: preferred oligonucleotide for gene RERE"
cctcaccagataaactacagtttgtttaggaggccctgaccttcatggtgtct

SEQ ID NO: 363 - DNA, 51 bp, artificial sequence
  source: /note="Description of artificial sequence: preferred oligonucleotide for gene RNASE4"
taatggaagaattgagacaaaaatccagtgtagctggccacttatccaggg

SEQ ID NO: 364 - DNA, 50 bp, artificial sequence
  source: /note="Description of artificial sequence: preferred oligonucleotide for gene RPL13A"
ttggactttccacctggtcatatactctgcagctgttagaatgtgcaagc

SEQ ID NO: 365 - DNA, 50 bp, artificial sequence
  source: /note="Description of artificial sequence: preferred oligonucleotide for gene SELE"
aggagtgtgagaatcaaaactctcctacacttccattaacttagcatgtg

SEQ ID NO: 366 - DNA, 60 bp, artificial sequence
  source: /note="Description of artificial sequence: preferred oligonucleotide for gene SELL"
ccaatatgtcaaaaattggacaaaagtttctcaatgattaaggagggtgattataacccc

SEQ ID NO: 367 - DNA, 50 bp, artificial sequence
  source: /note="Description of artificial sequence: preferred oligonucleotide for gene SELP"
tatttgcactgtagcctcgccgtctgtgaattggaccatcctatttaact

SEQ ID NO: 368 - DNA, 52 bp, artificial sequence
  source: /note="Description of artificial sequence: preferred oligonucleotide for gene SEPT9"
gtaaccagactttgaaaaattgttcgtttcatcaggctctgttcctcaatgg

SEQ ID NO: 369 - DNA, 52 bp, artificial sequence
  source: /note="Description of artificial sequence: preferred oligonucleotide for gene SIAE / OAE"
tgactgccctaaggaatgaaaagcaagggccaggtgggagtagcccagcgaa

SEQ ID NO: 370 - DNA, 55 bp, artificial sequence
  source: /note="Description of artificial sequence: preferred oligonucleotide for gene SIGLEC1 / CD169"
gactcttgctgggagcccgtccagaatgtcctcccaataaaactccatcctatga

SEQ ID NO: 371 - DNA, 52 bp, artificial sequence
  source: /note="Description of artificial sequence: preferred oligonucleotide for gene SIGLEC10"
gtagtcccagctgtcagacatttaaaccagagcaactccatctggaatagga

SEQ ID NO: 372 - DNA, 51 bp, artificial sequence
  source: /note="Description of artificial sequence: preferred oligonucleotide for gene SIGLEC11"
aattcagagcgagtttgaagatgacactttgaggcatcgtgtctatggttc

SEQ ID NO: 373 - DNA, 51 bp, artificial sequence
  source: /note="Description of artificial sequence: preferred oligonucleotide for gene SIGLEC12"
gctatgagtactccgagatcaacatccccaagtgagaaactgcagagactc

SEQ ID NO: 374 - DNA, 50 bp, artificial sequence
  source: /note="Description of artificial sequence: preferred oligonucleotide for gene SIGLEC2 / CD22"
ttccactctccttgctacccagaaatcatctaaatacctgccctgacatg

SEQ ID NO: 375 - DNA, 51 bp, artificial sequence
  source: /note="Description of artificial sequence: preferred oligonucleotide for gene SIGLEC3 / CD33"
taacaccccacaggcaatgggtttatagacattatgtgagtttcctgctat

SEQ ID NO: 376 - DNA, 55 bp, artificial sequence
  source: /note="Description of artificial sequence: preferred oligonucleotide for gene SIGLEC5"
tgtttaagtgctccaagcagagcagaaagaaaacagatgatggaattagagaggt

SEQ ID NO: 377 - DNA, 50 bp, artificial sequence
  source: /note="Description of artificial sequence: preferred oligonucleotide for gene SIGLEC6"
agaccacaggacttctgtccaagagaactgagttcaactccatctatgcc

SEQ ID NO: 378 - DNA, 50 bp, artificial sequence
  source: /note="Description of artificial sequence: preferred oligonucleotide for gene SIGLEC7"
caccattctcctctgtacttctctaaggatgactactttagattccgaat

SEQ ID NO: 379 - DNA, 51 bp, artificial sequence
  source: /note="Description of artificial sequence: preferred oligonucleotide for gene SIGLEC8"
cattgactttacaaaagagggagcagcaatggcctagagtctcaggaacaa

SEQ ID NO: 380 - DNA, 50 bp, artificial sequence
  source: /note="Description of artificial sequence: preferred oligonucleotide for gene SIGLEC9"
caggctttagagtcaaagtatctcaaacctgaatccacactgtgccctcc

SEQ ID NO: 381 - DNA, 50 bp, artificial sequence
  source: /note="Description of artificial sequence: preferred oligonucleotide for gene SLC2A1"
ggttctagtctcctttgcactgagggccacactattaccatgagaagagg

SEQ ID NO: 382 - DNA, 50 bp, artificial sequence
  source: /note="Description of artificial sequence: preferred oligonucleotide for gene SLC35A1"
atctgagtgaactgctaatacagaaacttaatgtagacctgtttggggtc

SEQ ID NO: 383 - DNA, 52 bp, artificial sequence
  source: /note="Description of artificial sequence: preferred oligonucleotide for gene SLC35A2"
cccctgccagctccacactatctcttagctgagtttttgcaaataaaatgtg

SEQ ID NO: 384 - DNA, 55 bp, artificial sequence
  source: /note="Description of artificial sequence: preferred oligonucleotide for gene SLC35A3"
tgaaagcaatccagttgctcctgtgctagatggtagccagagaattttatagtaa

SEQ ID NO: 385 - DNA, 53 bp, artificial sequence
  source: /note="Description of artificial sequence: preferred oligonucleotide for gene SLC35D1"
tggcagttcctacagagacactgaggtgtcttgattatggaggaaataaccat

SEQ ID NO: 386 - DNA, 50 bp, artificial sequence
  source: /note="Description of artificial sequence: preferred oligonucleotide for gene ST3GAL1"
actgattttaatcttcgaatcatgacactgagtgcagaggaggtggcatt

SEQ ID NO: 387 - DNA, 51 bp, artificial sequence
  source: /note="Description of artificial sequence: preferred oligonucleotide for gene ST3GAL2"
atctacaacccagccttcttcaagtatatccacgacaggtggacagagcat

SEQ ID NO: 388 - DNA, 50 bp, artificial sequence
  source: /note="Description of artificial sequence: preferred oligonucleotide for gene ST3GAL3"
gctgccggaatcacttctccaatcagtgtttggtgtattatcattttgtg

SEQ ID NO: 389 - DNA, 51 bp, artificial sequence
  source: /note="Description of artificial sequence: preferred oligonucleotide for gene ST3GAL4"
aggccagtagagaattctgcccactttttataaaaacttacagcgatggcc

SEQ ID NO: 390 - DNA, 52 bp, artificial sequence
  source: /note="Description of artificial sequence: preferred oligonucleotide for gene ST3GAL5"
acaaaacttctattatccagagtcatgggagagtacaccctttccaggaata

SEQ ID NO: 391 - DNA, 50 bp, artificial sequence
  source: /note="Description of artificial sequence: preferred oligonucleotide for gene ST3GAL6"
atctaagttcatactggtttaattaagctctctcctgacaacccccagaa

SEQ ID NO: 392 - DNA, 50 bp, artificial sequence; identical to SEQ ID NO: 386
  source: /note="Description of artificial sequence: preferred oligonucleotide for gene ST6GAL1"

SEQ ID NO: 393 - DNA, 50 bp, artificial sequence
  source: /note="Description of artificial sequence: preferred oligonucleotide for gene ST6GAL2"
ccggattacaacctgttcactccatatattcagcatcgtcagagaaaccc

SEQ ID NO: 394 - DNA, 52 bp, artificial sequence
  source: /note="Description of artificial sequence: preferred oligonucleotide for gene ST6GALNAC1"
tcttcagtacattgctgtaggtcctgaggccagggatttttaattaaatggg

SEQ ID NO: 395 - DNA, 50 bp, artificial sequence
  source: /note="Description of artificial sequence: preferred oligonucleotide for gene ST6GALNAC2"
aagattttcatcgaggtctgttcaatataggacaccccagcttgtccttg

SEQ ID NO: 396 - DNA, 52 bp, artificial sequence
  source: /note="Description of artificial sequence: preferred oligonucleotide for gene ST6GALNAC3"
acaaaggatggtcttggccatatgctagggcccctgtgaaaataagtagttt

SEQ ID NO: 397 - DNA, 2052 bp, Homo sapiens
tgtgtgtgtgctcacacccacacgtgtgactttgcacgcatttgtctttgagagagagataatagtttttgtttttctttcagtagccaaagtttaaaccattgctttttctttgattctatcgcttttaaggtgatctttcttaacacaggataagaaagcagtaatgtcctaaagaatgctgttgaattaattagtatcagcctctcctacagttctggaaggatacgtggttaagtaccactcctggatgaatcagaaaaacagccacttgagcaatttcgtgttctgtggttcagatgagaatcccagttgagaaagtaagaaaatatgtgtttattcttcagctttaaattgttatatcacaaacttccttcctccttggcaagctttcttttttgacgagaagaaaattgtaataaacaacagtatgactaatagatagtcacatggttacttccagtttgcaaaatgctatttatactttgagttactcttcaaaagtggtatacctctagtttggagctgtgctgtaaaaacaagagtaacatttttatattaaagttaaataaagttacaactttgaagagagtttctgcaagacatgacacaaagctgctagcagaaaatcaaaacgctgattaaaagaagcacggtatgatgaccaaacataaaaagtgttttataattgttggtgttttaataacaactaatattattactctgatagttaaactaactcgagattctcagagtttatgcccctatgattggattggtttccaaaacaaatgctattatttctctaaagaagaaggagattggaattcaagtaaatacaactgttccactcaacatgccgacctaactataattgacaacatagaagaaatgaattttcttaggcggtataaatgcagttctgatcactggattggactgaagatggcaaaaaatcgaacaggacaatgggtagatggagctacatttaccaaatcgtttggcatgagagggagtgaaggatgtgcctacctcagcgatgatggtgcagcaacagctagatgttacaccgaaagaaaatggatttgcaggaaaagaatacactaagttaatgtctaagataatggggaaaatagaaaataacattattaagtgtaaaaccagcaaagtacttttttaattaaacaaagttcgagttttgtacctgtctggttaattctgcttacgtgtcaggctacacataaaagccacttcaaagattggcaaaaaatggttacaggtattctgctgagtttttttctttctttctttctctctctctctttctttctttctttctttctttctttttttaactgtaaaccagaaaacaattgtggggatcaaggacagacatagcacttagacaggactttcatgacccaatatggaacaatttgagtaccagaataggagattatggcctattgaacaaaatgtgaaactgggagtccacaaagacataaatggaaagatgaagtacctcctgacagagcaagaatggcactgaacaatgttatatggacaatggctattttattcaagactattacaatagggaaaagagactaggactcagtctgaactgaaatctgtcaaaacaaaggggggtggggctttaagagtgaaggtgaggaggagatcacacaccgtatgtgtttgctaactggctttacccaaaagaaaattaaactttctttgatctgtacaagttgatcaaacaaatggggtcattcttgtcatatgcaactaaaacagggtagacaggccaggggaaaaaggcactcagggcacacagcattgcttcaaaatataattctctacaaacctagttgctaaaactacctgttgtaacctaaaaccagttttatctaacagctattaaaacaacctactgtgactgcaaaactggttttacccaccactgtcacacaccaatcagaacttgccagctcctcaaaactttactagggccaataaactttctttcaaaacaataaaaaaaaaaaaaaa

SEQ ID NO: 398 - DNA, 50 bp, artificial sequence
  source: /note="Description of artificial sequence: preferred oligonucleotide for gene ST6GALNAC5"
ccctaggcttcaggaaaactgctcttttgtaaaaagaatagcgatgacat

SEQ ID NO: 399 - DNA, 54 bp, artificial sequence
  source: /note="Description of artificial sequence: preferred oligonucleotide for gene ST6GALNAC6"
cccagacttggttttgtaatgatttgtacaggaataaacacacctacgctccga

SEQ ID NO: 400 - DNA, 51 bp, artificial sequence
  source: /note="Description of artificial sequence: preferred oligonucleotide for gene ST8SIA1"
atttctccaactctggtatcttcataaaatcggtgcactgagaatgcagct

SEQ ID NO: 401 - DNA, 50 bp, artificial sequence
  source: /note="Description of artificial sequence: preferred oligonucleotide for gene ST8SIA2"
cctttccgctggatcagaaccagaacccagtcaagtaccactattatgac

SEQ ID NO: 402 - DNA, 52 bp, artificial sequence
  source: /note="Description of artificial sequence: preferred oligonucleotide for gene ST8SIA3"
ctaaacggctgagcacaggtattcttatgtacacccttgcatcagcaatatg

SEQ ID NO: 403 - DNA, 53 bp, artificial sequence
  source: /note="Description of artificial sequence: preferred oligonucleotide for gene ST8SIA4"
gttatgctaacatcttcagggtctgcactgtgaactcccctggagataagtaa

SEQ ID NO: 404 - DNA, 51 bp, artificial sequence
  source: /note="Description of artificial sequence: preferred oligonucleotide for gene ST8SIA5"
cccaggttcaatcctgcgttagctcttttgatgagaaggaaataaaccaaa

SEQ ID NO: 405 - DNA, 70 bp, artificial sequence
  source: /note="Description of artificial sequence: preferred oligonucleotide for gene ST8SIA6"
aggaggtggctaaagagtattttgagatgagccccaaaatttggtttgaccaaagcttccccactcattt

SEQ ID NO: 406 - DNA, 51 bp, artificial sequence
  source: /note="Description of artificial sequence: preferred oligonucleotide for gene SULT1C2"
ttgggttcagtctcatgccatatttactcctagtacctaatgcagtgcctg

SEQ ID NO: 407 - DNA, 50 bp, artificial sequence
  source: /note="Description of artificial sequence: preferred oligonucleotide for gene SULT1C4"
agagggaagctcaataaatcactaggtacaatcctggtatcattgccaat

SEQ ID NO: 408 - DNA, 50 bp, artificial sequence
  source: /note="Description of artificial sequence: preferred oligonucleotide for gene TACSTD1"
aggtgaatccttgtttcattctaagaaaatggacctgacagtaaatgggg

SEQ ID NO: 409 - DNA, 50 bp, artificial sequence
  source: /note="Description of artificial sequence: preferred oligonucleotide for gene TAF15"
ctgctgctttcctcgtggcctcttcttgggtagtgaaattaagtgacatt

SEQ ID NO: 410 - DNA, 52 bp, artificial sequence
  source: /note="Description of artificial sequence: preferred oligonucleotide for gene TAX1BP1"
tgcactttctgaccaggagctactttgagtttggtgttactaggatcagggt

SEQ ID NO: 411 - DNA, 53 bp, artificial sequence
  source: /note="Description of artificial sequence: preferred oligonucleotide for gene TNFRSF1B"
gcaacagagtgagaccctgtctcttaaagaaaaaaaaagtcagactgctggga

SEQ ID NO: 412 - DNA, 51 bp, artificial sequence
  source: /note="Description of artificial sequence: preferred oligonucleotide for gene TUBA3C"
ccccagcgtggctgctttcaagttctttgcaattaaaggttctgtataaaa

SEQ ID NO: 413 - DNA, 53 bp, artificial sequence
  source: /note="Description of artificial sequence: preferred oligonucleotide for gene TUBA4"
aaagataggggggatgaatactaggggaatactgtgtgtctgtcctacataaa

SEQ ID NO: 414 - DNA, 50 bp, artificial sequence
  source: /note="Description of artificial sequence: preferred oligonucleotide for gene UAP1"
tgaaatataggcaggatgttcaacatcagtttacttgcagctggaagcat

SEQ ID NO: 415 - DNA, 52 bp, artificial sequence
  source: /note="Description of artificial sequence: preferred oligonucleotide for gene WBSCR1/EIF4H"
gcattatgtggtgtaatcaaacccgatgctttcagatgacctacttacatct

SEQ ID NO: 416 - DNA, 69 bp, artificial sequence
  source: /note="Description of artificial sequence: preferred oligonucleotide for gene WBSCR17 /GALNTL3"
ctcatttggtgacgtcttactggtgatcatctcctcaccccatctcccaccttgtggaataaatacatg

SEQ ID NO: 417 - DNA, 54 bp, artificial sequence
  source: /note="Description of artificial sequence: preferred oligonucleotide for gene ACT"
ggcggactatgacttagttgcgttacaccctttcttgacaaaacctaacttgcg

SEQ ID NO: 418 - DNA, 57 bp, artificial sequence
  source: /note="Description of artificial sequence: preferred oligonucleotide for gene ANXA4"
ggctagtagtttcttcatttgaaattgtaagcatccggtcagtaagaatgcccatcc

SEQ ID NO: 419 - DNA, 50 bp, artificial sequence
  source: /note="Description of artificial sequence: preferred oligonucleotide for gene ARAF"
ccccgccattcaaggactcctctctttcttcaccaagaagcacagaattc

SEQ ID NO: 420 - DNA, 60 bp, artificial sequence
  source: /note="Description of artificial sequence: preferred oligonucleotide for gene B3GNT2"
tcctggtggtatcatagtgtaattttagtatttgaaaatcagtgtgattccttaatggcc

SEQ ID NO: 421 - DNA, 70 bp, artificial sequence
  source: /note="Description of artificial sequence: preferred oligonucleotide for gene B3GNT5"
aaatgtcaacaaagggaaaataaactatcagcttggatggtcacttgaatagaagatggttatacacagt

SEQ ID NO: 422 - DNA, 53 bp, artificial sequence
  source: /note="Description of artificial sequence: preferred oligonucleotide for gene B4GALNT1"
tccccacccttttcttcttgatcttcctcagaccctttcccaaacccctctcc

SEQ ID NO: 423 - DNA, 70 bp, artificial sequence
  source: /note="Description of artificial sequence: preferred oligonucleotide for gene B4GALNT3"
gcctactaccaagaccggttcagctttcaggagtacatcaagattgaccagcctgagaagcaggggctgg

SEQ ID NO: 424 - DNA, 58 bp, artificial sequence
  source: /note="Description of artificial sequence: preferred oligonucleotide for gene B4GALT1"
aaagatcagagaggcagaggtggcacaggacagtaaaggagatgctgtgctgcctaca

SEQ ID NO: 425 - DNA, 50 bp, artificial sequence
  source: /note="Description of artificial sequence: preferred oligonucleotide for gene C1GALT1C1"
tccccaagttccaatggatttgccttctcaaaatgtacaactaagcaact

SEQ ID NO: 426 - DNA, 56 bp, artificial sequence
  source: /note="Description of artificial sequence: preferred oligonucleotide for gene CD69"
gaccaataaccatgcccaagaatgagaagaatgactatgcaacctttggatgcact

SEQ ID NO: 427 - DNA, 60 bp, artificial sequence
  source: /note="Description of artificial sequence: preferred oligonucleotide for gene CHST6"
ggccagctgagcccagcactgcggccaagtcgaagctttaggagcaataaaagtgcttat

SEQ ID NO: 428 - DNA, 52 bp, artificial sequence
  source: /note="Description of artificial sequence: preferred oligonucleotide for gene CXADR"
gccagccagatcaaggatgtagtatctcatagttcccaggtgatatttttct

SEQ ID NO: 429 - DNA, 58 bp, artificial sequence
  source: /note="Description of artificial sequence: preferred oligonucleotide for gene ETFB"
ctacgccacgctgcccaacatcatgaaagccaagaagaagaagatcgaggtgatcaag

SEQ ID NO: 430 - DNA, 54 bp, artificial sequence
  source: /note="Description of artificial sequence: preferred oligonucleotide for gene FUCA1"
atccagataaaggtctcttcatctctctaccccagttgccaccctctgctgtcc

SEQ ID NO: 431 - DNA, 58 bp, artificial sequence
  source: /note="Description of artificial sequence: preferred oligonucleotide for gene FUT1"
ccttaaacatagtcagctctgatcacatcccctgtctactcatccagaccccatgcct

SEQ ID NO: 432 - DNA, 60 bp, artificial sequence; identical to SEQ ID NO: 274
  source: /note="Description of artificial sequence: preferred oligonucleotide for gene FUT10"

SEQ ID NO: 433 - DNA, 57 bp, artificial sequence
  source: /note="Description of artificial sequence: preferred oligonucleotide for gene FUT2"
cccggccctagagctcactgttttctagttagtccatctggaagtggagcctttttc

SEQ ID NO: 434 - DNA, 50 bp, artificial sequence
  source: /note="Description of artificial sequence: preferred oligonucleotide for gene FUT3"
cagagttcagacaggtccaagttcaagcccaggaccaccacttatagggt

SEQ ID NO: 435 - DNA, 50 bp, artificial sequence
  source: /note="Description of artificial sequence: preferred oligonucleotide for gene FUT4"
gaaccagccatgcttctgcaaatcacaacctctttgagcctctgtcacct

SEQ ID NO: 436 - DNA, 50 bp, artificial sequence
  source: /note="Description of artificial sequence: preferred oligonucleotide for gene FUT5"
actatgggtgtgacctcggcgtgactctgatagtgcctgtggatgtgttg

SEQ ID NO: 437 - DNA, 53 bp, artificial sequence
  source: /note="Description of artificial sequence: preferred oligonucleotide for gene FUT6"
caccgtttccagatgtaatactgcaaagaaaaccgatgatgaggccgggtgcg

SEQ ID NO: 438 - DNA, 50 bp, artificial sequence
  source: /note="Description of artificial sequence: preferred oligonucleotide for gene FUT8"
actgacataggcttcaattggtggaattcctctttaacaagggctgcaat

SEQ ID NO: 439 - DNA, 53 bp, artificial sequence
  source: /note="Description of artificial sequence: preferred oligonucleotide for gene GALNT7"
aacatcagaagctgctgccataatgactattttctactgtaggctgctttgga

SEQ ID NO: 440 - DNA, 51 bp, artificial sequence
  source: /note="Description of artificial sequence: preferred oligonucleotide for gene GAPDH"
caccacactgaatctcccctcctcacagttgccatgtagaccccttgaaga

SEQ ID NO: 441 - DNA, 50 bp, artificial sequence
  source: /note="Description of artificial sequence: preferred oligonucleotide for gene GCNT1"
tgggtaggaagaggccatgtttcagttcgttttctctgtagggtcgattg

SEQ ID NO: 442 - DNA, 70 bp, artificial sequence
  source: /note="Description of artificial sequence: preferred oligonucleotide for gene GCNT2"
tgttaaccgtttcaggaccacgtttatagcttcaggacctggctacgtaattatacttaaaatatccact

SEQ ID NO: 443 - DNA, 60 bp, artificial sequence
  source: /note="Description of artificial sequence: preferred oligonucleotide for gene GCNT3"
tttgaagaaccctaaatcccaacaactgattgaatgggtaaaagacacttatagcccaga

SEQ ID NO: 444 - DNA, 50 bp, artificial sequence
  source: /note="Description of artificial sequence: preferred oligonucleotide for gene GLB1"
atcccagacttgccccaggacacctttatccagtttcctggatggaccaa

SEQ ID NO: 445 - DNA, 50 bp, artificial sequence
  source: /note="Description of artificial sequence: preferred oligonucleotide for gene GNE"
gtgggttagtgtgaaaaagagtttggctgattcctaaaactctgccagcc

SEQ ID NO: 446 - DNA, 60 bp, artificial sequence
  source: /note="Description of artificial sequence: preferred oligonucleotide for gene HDAC1"
aacatcagccatttttagattggttctgttttcgtaccttcccactggcctcaagtgagc

SEQ ID NO: 447 - DNA, 54 bp, artificial sequence
  source: /note="Description of artificial sequence: preferred oligonucleotide for gene LGALS1"
acggtgacttcaagatcaaatgtgtggcctttgactgaaatcagccagcccatg

SEQ ID NO: 448 - DNA, 57 bp, artificial sequence
  source: /note="Description of artificial sequence: preferred oligonucleotide for gene LGALS3"
acctgaccacttcaaggttgcagtgaatgatgctcacttgttgcagtacaatcatcg

SEQ ID NO: 449 - DNA, 50 bp, artificial sequence
  source: /note="Description of artificial sequence: preferred oligonucleotide for gene LGALS7"
gagaattcgcggcttggttcctcccaatgccagcaggttccatgtaaacc

SEQ ID NO: 450 - DNA, 52 bp, artificial sequence
  source: /note="Description of artificial sequence: preferred oligonucleotide for gene LGALS9"
atctgggctttaatgcagaggccatgtccttgtctggtcctgcttctggcta

SEQ ID NO: 451 - DNA, 50 bp, artificial sequence
  source: /note="Description of artificial sequence: preferred oligonucleotide for gene LLGL2"
ttgtagtgggctgggttttaagttataaatgttaactgcctctgggtgaa

SEQ ID NO: 452 - DNA, 60 bp, artificial sequence
  source: /note="Description of artificial sequence: preferred oligonucleotide for gene MGAT5"
tttaaatcagaagattgagccatacatgccatatgaatttacgtgcgaggggatgctaca

SEQ ID NO: 453 - DNA, 53 bp, artificial sequence
  source: /note="Description of artificial sequence: preferred oligonucleotide for gene NDST1"
tgcatttagtagctgcctgaccatcttcctcccaggccctcagtttcttcatc

SEQ ID NO: 454 - DNA, 54 bp, artificial sequence
  source: /note="Description of artificial sequence: preferred oligonucleotide for gene NEU1"
agagttccgagtgaacctgaccctgcgatggagcttcagcaatggtacctcatg

SEQ ID NO: 455 - DNA, 60 bp, artificial sequence
  source: /note="Description of artificial sequence: preferred oligonucleotide for gene PPIA"
gtggacaactcgaataagtttgacttgtgttttatcttaaccaccagatcattccttctg

SEQ ID NO: 456 - DNA, 57 bp, artificial sequence
  source: /note="Description of artificial sequence: preferred oligonucleotide for gene SELE"
agagaagttctggctgaacactggcaacgacaaagccaacagtcaaaacagagatgt

SEQ ID NO: 457 - DNA, 54 bp, artificial sequence
  source: /note="Description of artificial sequence: preferred oligonucleotide for gene SELL"
gcctccctcaaccccaccacttcttttataactagtcctttactaatccaaccc

SEQ ID NO: 458 - DNA, 51 bp, artificial sequence
  source: /note="Description of artificial sequence: preferred oligonucleotide for gene SIGLEC2 / CD22"
atctgctcgtcattttccttcccttctccatctctctggccctctacccct

SEQ ID NO: 459 - DNA, 51 bp, artificial sequence
  source: /note="Description of artificial sequence: preferred oligonucleotide for gene SIGLEC3 / CD33"
agagaaccatccagctcaacgtcacctatgttccacagaacccaacaactg

SEQ ID NO: 460 - DNA, 60 bp, artificial sequence
  source: /note="Description of artificial sequence: preferred oligonucleotide for gene ST3GAL4"
cccagacgcctacaacaagaagcagaccattcactactatgagcagatcacgctcaagtc

SEQ ID NO: 461 - DNA, 60 bp, artificial sequence
  source: /note="Description of artificial sequence: preferred oligonucleotide for gene ST6GALNAC2"
taccccagatgctaaagtgattcaaggactccaggacacctcttaagagcctttctaaga

SEQ ID NO: 462 - DNA, 50 bp, artificial sequence
  source: /note="Description of artificial sequence: preferred oligonucleotide for gene SULT1C2"
tgccacccttttgggaagccctaaaccaagtgaggtgttcttttcccttg

SEQ ID NO: 463 - DNA, 54 bp, artificial sequence
  source: /note="Description of artificial sequence: preferred oligonucleotide for gene TNFRSF1B"
gagagcccagccattaccatggagacaagaagggttttccaccctggaatcaag

SEQ ID NO: 464 - DNA, 60 bp, artificial sequence
  source: /note="Description of artificial sequence: preferred oligonucleotide for gene TUBA3C"
acggcaagtacatggcctgctgcatgttgtacaggggggatgtggtcccgaaagatgtca

SEQ ID NO: 465 - DNA, 2868 bp, Homo sapiens
cgggaggctgcgaggactgcaaaagggtggagtcggcctcgcccccgcccaggccccgcccctgccgggaacccactttcccagtcctaggcggcggtcagatccttgcaagcatggtcgcgccggggcttgtactcgggctggtgctgccattaatcctgtgggccgacagaagtgcaggtattggttttcgctttgcttcatacatcaataatgatatggtgctgcagaaggagcctgctggggcagtgatatggggcttcggtacacctggagccacagtgaccgtgaccctgcgccaaggtcaggaaaccatcatgaagaaagtgaccagtgtgaaagctcactctgatacgtggatggtggtactggatcctatgaagcctggaggacctttcgaagtgatggcacaacagactttggagaaaataaacttcaccctgagagttcatgacgtcctgtttggagatgtctggctctgtagtgggcagagtaacatgcagatgactgtgttacagatatttaatgctacaagggagttgtctaacactgcggcatatcagtctgtccgcatcctctctgtctctcccattcaagcagagcaggagctggaggaccttgttgcggttgacttgcagtggtctaagcccacctcagaaaacttaggccatggatatttcaagtacatgtcagcagtgtgctggctctttggacgtcacctttatgacactctgcagtatcccatcgggctgatcgcctccagctggggcgggacacccattgaagcctggtcatctggacggtcactgaaagcctgtggggtccctaaacaagggtccattccatacgattctgtaactggtcccagtaagcactctgttctctggaatgccatgatccatccactgtgcaatatgactctgaaaggggtagtatggtaccagggggagtccaatataaattataacacggatctgtacaattgcacattccctgcactcatcgaagactggcgtgaaaccttccaccgtggttcccaggggcagacggagcgtttcttcccatttggacttgtccagttatcttcagatttgtctaagaagagctcagacgatggatttccccagatccgttggcatcaaacagcagacttcggctatgtccccaacccaaagatgcccaatactttcatggctgtagctatggatctctgtgatagagactcgccttttggcagcatccaccctcgagataaacagactgtggcttatcggctgcatttgggggcccgtgctctggcttatggtgagaagaatttgacctttgaaggaccactgcctgagaagatagaactcttggctcacaaggggctgctcaatctcacatattaccagcaaatccaggtgcagaaaaaggacaacaagatatttgagatctcctgttgcagtgaccatcgatgcaagtggcttccagcttctatgaacaccgtctccacccagtccctgaccctggcgatcgattcttgtcatggcactgtggttgctctccgctatgcttggaccacgtggccttgtgaatataagcagtgtcccctataccaccccagtagtgccctgccagcccctcccttcattgctttcattacagaccagggtcctggacatcagagcaatgttgctaaatgactgtttcagtatgatcagaacttagatataaggatgggtccttcagattttagcatttaggagtttcaataataaccattgcttttaaaggaaattaatagaaagcctcattgaatggctttcagctagcacatggctgtttctatattctgatgagcccaggcttataggtaacttgaaatgcttgctttttgttccctagttggtctaagggtctgtattggactaattctgaactacagacaaattggacctcaatgtcatttacttccctcatattaatgggagtgaaatgtctaatacttttgcccctttttatccagagttgtgggaatctcaggattggaagagattttaaaggccacataggccagctagtgttcatgtgttctttataaaatttctcccatccaagtactaaccaggcccgaccctgcttagcttccgagatcagatgagatcaggcgcgttcagggtgatatggccgtagacgtctttacaaaattcctgacaggtggttactgaatctctctatgaactttccattcaaaactttccaagtttttccttatgtggaaccgaaatctttctttctcccgtgaaactttactactatcagataattgaagacagatctctttgtattctcttcaagcccaaaccaattctgttccttcaatctaaatagtggtaatatgaatgtttaagaaatgaaataagaaacatgtgcaggcactttggaaggtgctaagtgactgccctaaggaatgaaaagcaagggccaggtgggagtagcccagcgaaggcacttgggctgccaggaacaggaggcgtgggaaactctggcttaggaaaacatgaacacaggggcaacagaggcaaactgttgttcgagttaaatataaatctcaggctctttaaaggtaaaaggtttaaggataatccatttggaagaagaaaagagtgaggctgaaagtaaagccacatgacaagcatataaaaaaaaatgcagatgatacaaatatgaaagaggccttcagtgtttgtttattaagaatcttaatgcagtttactgatggattaaaaacagctaacattgtctgaaaattatgttacctataagaagttggaaataaataaaagcataatcactaaaaaaaaaaaaaaaaaaaaaaaaaaaaaa

SEQ ID NO: 466 - DNA, 3409 bp, Homo sapiens
gggcccagatagaacaagaaggcagaagaaatgtgaattcctctttctctgctggagctgggatattcttcttctcctgcccttggacatcagagctgcaggctctctggcctttggacccgaggatttataccaagcaggtttctgggttctcaggcctttggccttggactgatagttacaccattggcatatctggttctgaggctcttggtcttggactgagccacactcctggcatcccagcgtctccagcttgcatggcctgtcacgtgattcctgtcagaatcaccatttttggtaaacaaaccaagcccagaacctgataattatggagcattctacactgacagttctttgagacaaatttcctcttggcatttacactgtggctttagctttcaaaccagaggttcctcttacccagcaaaaagtgagttatacgctttcttaatgttataacgttaccatggatgatcctgaacttgccgaggatagcagagacgggtgggcagaacaggaaagaatcagatcagagactgtaaaaagtaacttaaaaaaaaataattctggcagagacagaatttgaaggtacttgtgcacatcagaacactggacttgcttttttctgggagcaggaatgctgcttaattagatcagagaagaatgcaagtggtccatacatttagatctacaatgcgtggtttccagacctgcagcttgttttgctgcgcttcatcatggagtcatagaagggcagagctggaggaccgagtgagggacctggtgccatatccctacagacaggcaattggagactcccgtaggttaagggctgcagagcctggaccaatgcccagaatctctgagctttttatcttacaccatgaagtgacagatgctggcagatgttagacctttgtgcttaactgtttaaccacacagcacccgacttctgtatgcagcgaggttctagagtttccaaaacacgggtctcctctcccacctcagcctcctagcataaaactagacacatcctcatgcttttgaggtctaatcattggattttgttcctttcagatggctttcccgaagatgagattgatgtatatttgccttctggttctgggggctctttgtttgtattttagcatgtacagtctaaatcctttcaaagaacagtcctttgtttacaagaaagacgggaacttccttaagctcccagatacagactgcaggcagacacctcccttcctcgtcctgctggtgacctcatcccacaaacagttggctgagcgcatggccatccggcagacgtgggggaaagagaggatggtgaagggaaagcagctgaagacattcttcctcctggggaccaccagcagtgcagcggaaacgaaagaggtggaccaggagagccagcgacacggggacattatccagaaggatttcctagacgtctattacaatctgaccctgaagaccatgatgggcatagaatgggtccatcgcttttgtcctcaggcggcgtttgtgatgaaaacagactcagacatgttcatcaatgttgactatctgactgaactgcttctgaagaaaaacagaacaaccaggtttttcactggcttcttgaaactcaatgagtttcccatcaggcagccattcagcaagtggtttgtcagtaaatctgaatatccgtgggacaggtacccaccattctgctccggcaccggctacgtgttttctggcgacgtggcgagtcaggtgtacaatgtctccaagagcgtcccatacattaaactggaagacgtgtttgtggggctctgcctcgaaaggctgaacatcagattggaggagctccactcccagccgaccttttttccagggggcttacgcttctccgtatgcctcttcaggaggatcgtggcctgccacttcatcaagcctcggactctcttggactactggcaggctctagagaattcccggggggaagattgtccgcctgtctgaggggagcccagaggcacatccggacaagtttcagataacccgtggggatagtttttgctagattttggaagagggggcgggacagaggatgctgttcttcagtgctgaaatccacgccagaatgtcggtgttcatgaagtcactgattagttcccacttggtgccccaggcaataataggcccgtctcttgggcacgcacactcttcatactaagtgtttgacatacacctggatttttgcatttcaggggtcagtatcctatgacatgatgggtgttaccatcctaattttacaggcaaggacacagcagctgcgagaggtacagaaacttgtcccaaggctcacagccagtaggcataggagcgggaatgaaaatcgagcactgtcagaatctggtgggcagcccctgacttgaaccactcccacgtgctgcctcccttaggaggggacactgatgatgaggtctcggagccggcatccttccatccctgtcgagtcccctccacctcagctcccagtccttgtgctttttggagctaagcctgggatgaccaaattcaccccagctccttcattcacagggctggatgtagctgggattgagtccatgttatcggctcggtactcaacacaacccaagtttcatccgaggaaatgtccccgcagtggatgcagctcacatgctgaggaacacccagctctggacagagttcttataaatgtataaattaggctcagaaaccactgcattctgacctgctgtacagactgcccacactgctgacctgcctagcgagcaggacatcccttctgagccatctgctgctctctcatttcatcaccccaactgtcccttgtttttgatcaatggggaccagccactgccccaggagcactttagggctctcagttcaaactgaaggacagttgaactcagatggggttcatgtgggattctgggagctttctgggaattcagttggagtcaagtcaggatgctctcaaggacccctcgggctcagagccctaaagtgggccctggtgaagcagggtggtcctgcgtccacttcccaagcctgagccaagctcatcttcattgaatgtctcatttggccgaggaacaactgaactttgtggtttgctgtttagccttcagtttgctccgctgcctcctacccagaggtttgtgcgagcctgtgttgcagggttgtataaaaccaaggtacttcgttagttttgcccattcagccatggtcacgtgacatgcaaagtaatcttgctcctaattatagaaatgatttttcttttaattttttactttaccagactttactttgtactcagagaagaggcctcacatggctgtgtcacatataaatgttggactaaactctt

SEQ ID NO: 467 - DNA, 4219 bp, Homo sapiens
gcagaccaaagtgagagagggacgcaccgcatctccaggcacatccaaaaaggatggacgagacaccgaagcagaggatacaggaggattaaaggattcaggaaagcaagcagccctccggagaagctgtcgaaattcaagactggcaagagaagcaaattcaacctctcacaccgatcatttctcattccctgaaaagaagagattgtttccccagggaagtgaaaataatgaacttttggaggtactgcttttttgctttcactctgctcagcgtggtcatttttgtgagattttacagtagccaattgagcccgccaaaaagttatgagaagctgaacagttccagtgaaaggtattttaggaaaactgcctgtaatcacgccttagagaaaatgccagtctttttgtgggaaaatatattaccatcacctttgcgaagtgtcccttgcaaggattacctgacccagaatcactacatcacaagtcccctgtcggaagaagaggctgcattccctttggcctatgtcatggtcatccataaggactttgacacctttgaaaggctctttagggctatctatatgccccaaaatgtctactgtgttcacgtggatgagaaagccccagctgagtataaggaatctgtgaggcagttactgagttgcttccaaaatgctttcattgcttcaaagacagagtctgtggtttatgcaggcatttccagactccaggctgacctgaactgtctgaaagaccttgtcgcctctgaggttccctggaagtacgtcatcaacacctgtggacaagacttccccctgaaaaccaaccgggagatagttcagcatctgaaaggatttaaagggaaaaatatcaccccaggggtgctgcctcctgaccatgcaattaagcgaactaaatatgtccaccaagagcatacagataaaggtggcttttttgtgaaaaatactaatattttgaaaacttcacctccacatcagctgaccatctactttggcactgcctatgtggcgcttaccagagactttgtcgactttgttctacgtgaccaaagggccattgatctactacaatggtcaaaagatacctatagtcctgatgagcatttctgggtgacacttaatagggtttcaggtgttcctggctctatgccaaatgcatcctggactggaaacctcagagctataaagtggagtgacatggaagacagacacggaggctgccacggccactatgtacatggtatttgtatctatggaaacggagacttaaagtggctggttaattcaccaagcctgtttgctaacaagtttgagcttaatacctacccccttactgtggaatgcctagaactgaggcatcgcgaaagaaccctcaatcagagtgaaactgcgatacaacccagctggtatttttgagctattcatgagctactcatgactgaagggaaactgcagctgggaagaggagcctgtttttgtgagagacttttgccttcgtaatgttaaccgtttcaggaccacgtttatagcttcaggacctggctacgtaattatacttaaaatatccactggacactgtgaaatacactaacaggatggctgggtagagcaatctgggcactttggccaattttagtcttgctgtttcttgatgctcacctctatattagtttattgttaggatcaatgataaatttaaatgacctcagatctttgcaccagatactcatcatatacaaatgttttagtaaaaaagagaattgtagataatactgtctaggaaaataagaattaggtttctttgaagaaggaatcttttataacaccttaacagtcaccactgtgctcaaccagacagatagtgaaacagctttctgggtaattcaccaatttcctttaaaacataagctacctgaatggagaatacatcttgtttctgagtttcaacactagcatttttggcttactcatggacaaagttctgtatatagtataaagtcattaacaagaaacaggatatgctttaagacagaattcactgtctgttgcttcagtaaaaggacctcggggaataaaacatttctctcttatatgccagaatgtaggctggtccctatgtcatgtcttccattaagaacactaaaaagtccttgcaagaatggagatatgcattcaagagaggtgctatcacatagatctagtctgaagtctggaacactttcctcttctatgacccctctctccccagtattatcttacttgcaaaatggagaccaaattctatcctgtgaggcttttaattgcaccatagtatgctctgagtagctttacactgcctggtactgatagtagtggctcgatttttaagagccttcaattgtagatgaacatctctgttatttatccctcattcatccatccgttcattcattcagccttcaatcaacatctcttgagtgtctattatgtacaggacatgtactgagacaaaaaggaaacataagagctttttcactctaaaaatcttggcaataatgtcaacaccagaaagcctcctctggagaatcttacagagtgattgtagtttaatacaggaacacacagggctgtgtagcatgataccaggcccaggagatcagtaattacaaattaagggttaaatcagagattattcaacagagagggagaaaggaggagacagagggaggacctgttgtgttccagccattctggtattcctttatgtatctaatttcattcaaacctcacaacagtcttgtgaggcccttatataattactcccattttgcagatgaagtaactgaggcttagaaaggttaatagcaccggggaacaatttctctgggtgagaattgggactctgttgctggtcttctcagttcatttcctgaggtggatttactgagagaaggtgaaataaagccatatttagtataccagagaaggtagattttaagaatggtctcagtgttaatactgagaaaaagtcctgtcagttcagaaaaaatgtgaagtctactttagtattcctgtaatactaaaccgttgagtttctaaatatttatttattctaacaaaaagcaattactacaaatggatgacacatttaatgaacacaattttattttttttctgtaactgtgcttgttgaatgtcaatcatatttaaagggaatgactttgaagtaaaaccttttttcttgctactgaaaaaaatggagttgttttgggtggtaaagtgttaaggaatagggacagctggtcacacaaggaactcttgaaggccacatgtgaaaacctgtcacttgcacagaggccagtcccactaaggtgaccagagtgggctccaagcacaaactgccattggctatagatgggactgtgtccccccaaaattcatgtgttggagccttaaccctcaatgtgatggtatttgagatggggcctttggtaagggaagtttagatgaggtcacgagggtaggaccctcatgatgggatgagtccccttacaagacctctggcttgggccgggcgtggtggctcacacctgtaatcccaacactttgggaggccaaggcaggtagatcacttgatgccaggagttccagaccaggctggccgacatggtgaaaccccatctctactaaaaaatataaaaattagccgggctttgtggcatgtgcctgtaatcccagctatttggcaggctgaggcatgagaatcgcttgaacccaggaggtggaggttacagtgagctgagagtgccccactgcactccagcctgggtgacagagcgagactttgtcccaaaacaaaataggtgaggggatagcgaatgcactcagggtcagcagtggagtttaaaaattgtctcttttcaacttatttaaatgacagcacctgagaagaggaaccgttttacactggatgtttctcatgtagaacaagaaatctttctggaattgatgtttacatgtctgttgttggtcatctctcctgtgtcttaaatactttaatgttggaagagcatagtgtttgggctagtgggtttctgacagcccatgggaatgccctgaaactactgtatctgatgtttgttttcgatgaggttccatgttttgttttcttgggaataaattaatatattgttttccaaaaaaaaaaaaaaaaaaaa

SEQ ID NO: 468 - DNA, 4423 bp, Homo sapiens
gttactagactctggccgggacaagaggctgaggttaaggtcttagagccgatgacttgcagaatggtcacctcacccacttgtaatttcatggtgggaacaggtggaccccctggaatcagaacctctctgaggacatctgtttttgtgtagacacaggttgcaggttagcaggagaacaggcaagccaaatgcaaaggagccacttcagaaatgtgtcacagaaaagtgaaaatgcaacctagtggtaagtgaagaggggaagaagaaagaaaaaggaccagaaccgtgaactgaagggacagggaacagccagacgagagcttcagccatcacgaggatgatttcggaacctggagaaaatgtaagttaaatatatctacactctgatcctatctcaagagagagatattttactcatttcctggttgtgaatgatgggctcttggaagcactgtctttttagcgcgtctcttatctctgccctgatttttgtatttgtttacaatactgagttatgggagaataaacgttttctgagggcagctctgtccaatgcttcactgttagcagaagcctgtcatcagatttttgaggggaaagttttttacccaacagaaaatgcattgaaaactacccttgatgaagctacctgctatgagtacatggttcgaagccactatgtaacagaaacactctctgaagaagaggctgggttccctttagcttacacagtgaccatccacaaagacttcggcacttttgagaggctcttcagggcgatttatatgccccaaaatgtctactgtgtgcacctggatcagaaggcgacggatgcctttaaaggtgcagtgaaacagttactcagctgcttcccaaatgcttttctggcttccaagaaggagtcggttgtctatggggggatctccaggctccaggctgacctgaactgcctggaagaccttgtggcctctgaagttccctggaagtatgtcatcaacacctgcgggcaagactttcccctgaaaaccaacagggaaatagttcagtatctgaagggatttaaagggaaaaatatcacccccggagtgctgcctcctgaccacgctgttggacggactaaatacgtccaccaagaactgttaaaccacaaaaattcctacgtgattaaaacaacaaaattaaaaactcctcctcctcatgacatggtgatttactttggcacggcctacgtggctctcacaagggactttgctaacttcgtcctccaagaccagctcgcacttgacttactctcctggtccaaggacacctacagccccgacgaacatttctgggtgacactcaacaggattcccggtgttcctggctctatgccaaatgcatcctggactggaaacctcagagctataaagtggagtgacatggaagacagacacggaggctgccacggccactatgtacatggtatttgtatctatggaaacggagacttaaagtggctggttaattcaccaagcctgtttgctaacaagtttgagcttaatacctacccccttactgtggaatgcctagaactgaggcatcgcgaaagaaccctcaatcagagtgaaactgcgatacaacccagctggtatttttgagctattcatgagctactcatgactgaagggaaactgcagctgggaagaggagcctgtttttgtgagagacttttgccttcgtaatgttaaccgtttcaggaccacgtttatagcttcaggacctggctacgtaattatacttaaaatatccactggacactgtgaaatacactaacaggatggctgggtagagcaatctgggcactttggccaattttagtcttgctgtttcttgatgctcacctctatattagtttattgttaggatcaatgataaatttaaatgacctcagatctttgcaccagatactcatcatatacaaatgttttagtaaaaaagagaattgtagataatactgtctaggaaaataagaattaggtttctttgaagaaggaatcttttataacaccttaacagtcaccactgtgctcaaccagacagatagtgaaacagctttctgggtaattcaccaatttcctttaaaacataagctacctgaatggagaatacatcttgtttctgagtttcaacactagcatttttggcttactcatggacaaagttctgtatatagtataaagtcattaacaagaaacaggatatgctttaagacagaattcactgtctgttgcttcagtaaaaggacctcggggaataaaacatttctctcttatatgccagaatgtaggctggtccctatgtcatgtcttccattaagaacactaaaaagtccttgcaagaatggagatatgcattcaagagaggtgctatcacatagatctagtctgaagtctggaacactttcctcttctatgacccctctctccccagtattatcttacttgcaaaatggagaccaaattctatcctgtgaggcttttaattgcaccatagtatgctctgagtagctttacactgcctggtactgatagtagtggctcgatttttaagagccttcaattgtagatgaacatctctgttatttatccctcattcatccatccgttcattcattcagccttcaatcaacatctcttgagtgtctattatgtacaggacatgtactgagacaaaaaggaaacataagagctttttcactctaaaaatcttggcaataatgtcaacaccagaaagcctcctctggagaatcttacagagtgattgtagtttaatacaggaacacacagggctgtgtagcatgataccaggcccaggagatcagtaattacaaattaagggttaaatcagagattattcaacagagagggagaaaggaggagacagagggaggacctgttgtgttccagccattctggtattcctttatgtatctaatttcattcaaacctcacaacagtcttgtgaggcccttatataattactcccattttgcagatgaagtaactgaggcttagaaaggttaatagcaccggggaacaatttctctgggtgagaattgggactctgttgctggtcttctcagttcatttcctgaggtggatttactgagagaaggtgaaataaagccatatttagtataccagagaaggtagattttaagaatggtctcagtgttaatactgagaaaaagtcctgtcagttcagaaaaaatgtgaagtctactttagtattcctgtaatactaaaccgttgagtttctaaatatttatttattctaacaaaaagcaattactacaaatggatgacacatttaatgaacacaattttattttttttctgtaactgtgcttgttgaatgtcaatcatatttaaagggaatgactttgaagtaaaaccttttttcttgctactgaaaaaaatggagttgttttgggtggtaaagtgttaaggaatagggacagctggtcacacaaggaactcttgaaggccacatgtgaaaacctgtcacttgcacagaggccagtcccactaaggtgaccagagtgggctccaagcacaaactgccattggctatagatgggactgtgtccccccaaaattcatgtgttggagccttaaccctcaatgtgatggtatttgagatggggcctttggtaagggaagtttagatgaggtcacgagggtaggaccctcatgatgggatgagtccccttacaagacctctggcttgggccgggcgtggtggctcacacctgtaatcccaacactttgggaggccaaggcaggtagatcacttgatgccaggagttccagaccaggctggccgacatggtgaaaccccatctctactaaaaaatataaaaattagccgggctttgtggcatgtgcctgtaatcccagctatttggcaggctgaggcatgagaatcgcttgaacccaggaggtggaggttacagtgagctgagagtgccccactgcactccagcctgggtgacagagcgagactttgtcccaaaacaaaataggtgaggggatagcgaatgcactcagggtcagcagtggagtttaaaaattgtctcttttcaacttatttaaatgacagcacctgagaagaggaaccgttttacactggatgtttctcatgtagaacaagaaatctttctggaattgatgtttacatgtctgttgttggtcatctctcctgtgtcttaaatactttaatgttggaagagcatagtgtttgggctagtgggtttctgacagcccatgggaatgccctgaaactactgtatctgatgtttgttttcgatgaggttccatgttttgttttcttgggaataaattaatatattgttttccaaaaaaaaaaaaaaaaaaaa

1. A support onto which a set of probes is deposited wherein the set comprises:
(a) probes capable of specifically hybridising with nucleic acids encoding fucosyltransferases;
(b) probes capable of specifically hybridising with nucleic acids encoding galactosyltransferases;
(c) probes capable of specifically hybridising with nucleic acids encoding N-acetylglucosaminyltransferases;
(d) probes capable of specifically hybridising with nucleic acids encoding N-acetylgalactosaminyltransferases;
(e) probes capable of specifically hybridising with nucleic acids encoding sialyltransferases;
(f) probes capable of specifically hybridising with nucleic acids encoding sugar sulfotransferases;
(g) probes capable of specifically hybridising with nucleic acids encoding lectins;
(h) probes capable of specifically hybridising with nucleic acids encoding selectins;
(i) probes capable of specifically hybridising with nucleic acids encoding fucosidases;
(j) probes capable of specifically hybridising with nucleic acids encoding neuraminidases (sialidases);
(k) probes capable of specifically hybridising with nucleic acids encoding nucleotide sugar epimerases;
(l) probes capable of specifically hybridising with nucleic acids encoding sugar kinases;
(m) probes capable of specifically hybridising with nucleic acids encoding sugar epimerases; and
(n) probes capable of specifically hybridising with nucleic acids encoding sugar transporters; and
(o) probes capable of specifically hybridising with nucleic acids encoding enzymes of the fucose or sialic acid metabolism.

2. A support onto which a set of probes is deposited wherein the set comprises:
(a) probes capable of specifically hybridising with nucleic acids encoding fucosyltransferases;
(b) probes capable of specifically hybridising with nucleic acids encoding galactosyltransferases;
(c) probes capable of specifically hybridising with nucleic acids encoding N-acetylglucosaminyltransferases;
(d) probes capable of specifically hybridising with nucleic acids encoding N-acetylgalactosaminyltransferases;
(e) probes capable of specifically hybridising with nucleic acids encoding sialyltransferases;
(f) probes capable of specifically hybridising with nucleic acids encoding sugar sulfotransferases;
(g) probes capable of specifically hybridising with nucleic acids encoding lectins;
(h) probes capable of specifically hybridising with nucleic acids encoding selectins;
(i) probes capable of specifically hybridising with nucleic acids encoding fucosidases;
(j) probes capable of specifically hybridising with nucleic acids encoding neuraminidases (sialidases);
(k) probes capable of specifically hybridising with nucleic acids encoding nucleotide sugar epimerases;
(l) probes capable of specifically hybridising with nucleic acids encoding sugar kinases;
(m) probes capable of specifically hybridising with nucleic acids encoding sugar epimerases;
(n) probes capable of specifically hybridising with nucleic acids encoding sugar transporters; and /or
(o) probes capable of specifically hybridising with nucleic acids encoding enzymes of the fucose or sialic acid metabolism;
wherein at least one probe selected from (k), (l) or (m) is contained in the set of probes.

3. The support according to claim 1 or 2 which is a solid support.

4. The support according to claim 3, wherein the support is glass.

5. The support according to claim 1, wherein the probes are oligonucleotide probes.

6. The support according to claim 1, wherein the probes have a length of approximately 70 bases.

7. The support according to claim 1, wherein the fucosyltransferases, galactosyltransferases, N-acetylglucosaminyltransferases, N actylgalactosaminyltransferases, sialyltransferases, sugar sulfotransferases, lectins, selectins, fucosidases, neuraminidases, sialidases, nucleotide sugar epimerases, sugar kinases, sugar epimerases, sugar transporters and/or enzymes of the fucose or sialic acid metabolism are selected from Table 1.

8. The support according to claim 1, wherein each of the proteins of Table 1 is represented by at least one probe on the support.

9. A kit, comprising the set of probes as defined in any one of claims 1 or 2.

10. (canceled)

11. A method for the quantitative determination of the expression of nucleic acids encoding fucosyltransferases, galactosyltransferases, N acetylglucosaminyltransferases, N-actylgalactosaminyltransferases, sialyltransferases, sugar sulfotransferases, lectins, selectins, fucosidases, neuraminidases (sialidases), nucleotide sugar epimerases, sugar kinases, sugar epimerases, sugar transporters and/or enzymes of the fucose or sialic acid metabolism comprising the steps
(a) contacting the support of claim 1 with a preparation of labelled nucleic acids obtained by reverse transcription of mRNAs present in a sample obtained from a cell, a tissue or an organism; and
(b) quantifying the amount of label bound to the probes on the support.

12. The method according to claim 11, further comprising the step of
(c) determining the expression of the fucosyltransferases, galactosyltransferases, N-acetylglucosaminyl transferases, N acetylgalactosaminyl transferases, sialyltransferases, sugar sulfotransferases, lectins, selectins, fucosidases, neuraminidases, sialidases, nucleotide sugar epimerases, sugar kinases, sugar epimerases, sugar transporters and/or enzymes of the fucose or sialic acid metabolism, wherein the determination of the expression in step (c) comprises
(I) determining the amount of mRNA by means of PCR, Ribonuclease Protection Assay or SAGE (“Serial Analysis of Gene Expression”); and/or
(II) determining the amount of protein.

13. The method according to claim 12, wherein the determination in step (c) is carried out using antibodies which are specific for the fucosyltransferases, galactosyltransferases, N-acetylglucosaminyltransferases, N acetylgalactosaminyltransferases sialyltransferases, sugar sulfotransferases, lectins, selectins, fucosidases, neuraminidases, sialidases, nucleotide sugar epimerases, sugar kinases, sugar epimerases, sugar transporters and/or enzymes of the fucose or sialic acid metabolism.

14. The method of claim 11, wherein the expression indicates
(a) the status of glycosylation;
(b) the disease state;
(c) malignancy; and/or
(d) the potential of formation of metastases
of the cell, the tissue or the organism.

15. A diagnostic composition, comprising the set of probes as defined in any one of claims 1 or 2.

16. Use of the set of probes as defined in claims 1 or 2 for the preparation of one or more diagnostic compositions or of a diagnostic apparatus for the diagnosis of tumours, inflammatory and/or neurological diseases.

17. The use according to claim 16, wherein the tumour is selected from the group consisting of colorectal carcinoma, gastric carcinoma, mamma carcinoma, pancreatic carcinoma, melanoma, sarcoma and lymphoma, such as Hodgkin's lymphoma and Non-Hodgkin's lymphoma.
